(19) United States
(12) Patent Application Publication
(10) Pub. No.: US 2023/0058319 A1
(43) Pub. Date: Feb. 23, 2023

(54) COMPOSITIONS AND METHODS FOR INHIBITION OF PATHOGENIC BACTERIA IN AQUACULTURE

(71) Applicant: BiOWiSH Technologies, Inc., Cincinnati, OH (US)

(72) Inventors: Richard S. CARPENTER, West Chester, OH (US); JoElla BARNES, Arcola, IL (US); John Kennedy CROCKETT, Kingsville, TX (US); Loc H. TRAN, Ho Chi Minh City (VN)

(21) Appl. No.: 17/786,322

(22) PCT Filed: Dec. 17, 2020
(86) PCT No.: PCT/US2020/065517

§ 371 Date: Jun. 16, 2022

Related U.S. Application Data
(60) Provisional application No. 62/949,589, filed on Dec. 18, 2019.

(51) Int. Cl. C02F 1/50; A23K 10/33; A23K 10/18; A23K 10/12

(52) U.S. Cl. CPC C02F 1/50; A23K 10/33; A23K 10/18; A23K 10/12

(57) ABSTRACT

One aspect of the invention relates to a composition comprising: water, soybean, molasses, a mineral mixture, an enzyme, and a microbial mixture comprising Bacillus subtilis 34KLB. Another aspect of the invention relates to a fermented composition of the above composition.

### RELATED APPLICATIONS

[0001] This application claims priority to and the benefit of U.S. Provisional Patent Application No. 62/949,589, filed on Dec. 18, 2019, the disclosure of which is hereby incorporated by reference in its entirety.

### INCORPORATION BY REFERENCE OF SEQUENCE LISTING

[0002] The contents of the text file named “BIOW-022P01US_Sequence_Listing.txt”, which was created on Nov. 15, 2019 and is 5.21 MB in size, are hereby incorporated by reference in their entirety.

### FIELD OF THE INVENTION

[0003] The present invention relates to compositions and methods used for inhibition of pathogenic bacteria in aquaculture.

### BACKGROUND OF THE INVENTION

[0004] Aquaculture is the farming of fish, shrimp, crustaceans, mollusks, aquatic plants, algae, and other organisms. Aquaculture involves cultivating freshwater and saltwater populations under controlled conditions, and can be contrasted with commercial fishing, which is the harvesting of wild fish. The global aquaculture market was valued at US $176.45 billion in 2017.

[0005] Currently, the shrimp industry is beset with disease and water quality issues. Adding to the situation is the need to increase stocking density and shorten grow out days of culture to compensate for increased populations and increasing consumption of seafood. Current strains of Post Larvae (PL) are bred to be specific pathogen free; however, they have slow growth rates. Newer hybrid strains that are fast growing are being introduced, but are susceptible to stressors, particularly transportation stress.

### SUMMARY OF THE INVENTION

[0006] Aspects of the current invention relate to fermented soy products and the use thereof to promote the growth of a healthy heterotrophic bacterial population in aquaculture (e.g., a pond) that can out-compete pathogenic bacterial growth. In addition, the fermented soy products described herein can have inhibitory effects on the growth of pathogenic bacteria including, but not limited to, Vibrio parahaemolyticus.

[0007] One aspect of the invention relates to a composition comprising: water, soybean, molasses, a mineral mixture, an enzyme, and a microbial mixture comprising Lactobacillus plantarum, Pediococcus acidilactici, Pediococcus pentosaceus, and Bacillus subtilis 34KLB.

[0008] In some embodiments, Lactobacillus plantarum, Pediococcus acidilactici, and Pediococcus pentosaceus are present at a ratio of about 1:1:1 by colony-forming unit (CFU).

[0009] In some embodiments, Lactobacillus plantarum, Pediococcus acidilactici, and Pediococcus pentosaceus are present in the microbial mixture at equal to or greater than 1×10⁸CFU per gram of the microbial mixture.

[0010] In some embodiments, Bacillus subtilis 34KLB is present in the microbial mixture at equal to or greater than 10⁶ CFU per gram of the microbial mixture.

[0011] In some embodiments, the microbial mixture further comprises a water-soluble diluent. In some embodiments, the water-soluble diluent is selected from dextrose monohydrate, anhydrous dextrose, sucrose, maltose, maltodextrin, sodium chloride, potassium chloride, calcium chloride, magnesium chloride, sodium sulfate, potassium sulfate, sodium bicarbonate, sodium carbonate, and magnesium sulfate. In some embodiments, the microbial mixture comprises about 95.45 wt % dextrose monohydrate, about 4 wt % diatomaceous earth, about 0.4 wt % of a mixture having Lactobacillus plantarum, Pediococcus acidilactici, and Pediococcus pentosaceus, and about 0.15 wt % Bacillus subtilis 34KLB.

[0012] In some embodiments, the mineral mixture comprises about 64.15 wt % dipotassium phosphate, about 20 wt % calcium propionate, about 4.5 wt % gemstone manganese, about 3.1 wt % gemstone iron, about 2.8 wt % gemstone copper, about 2.7 wt % gemstone zinc, about 2.67 wt % selenium yeast 3000, and about 0.08 wt % cobalt sulfate monohydrate.

[0013] In some embodiments, the enzyme is selected from phytase, protease, amylase, cellulase, cellobiohydrolase, endoglucanase, exoglucanase, and lipase.

[0014] In some embodiments, the soybean is raw soybean.

[0015] In some embodiments, the soybean is soybean meal.

[0016] In some embodiments, the weight ratio of water, raw soybean, molasses, the mineral mixture, and the microbial mixture is about 3000:1000:50:2.5:5.

[0017] In some embodiments, the weight ratio of water, soybean meal, molasses, the mineral mixture, and the microbial mixture is about 1000:167:1.25:0.003:0.013.

[0018] One aspect of the invention relates to a composition comprising: water, soybean, molasses, a mineral mixture, an enzyme, and a microbial mixture comprising a Bacillus composition.

[0019] In some embodiments, the Bacillus composition comprises Bacillus subtilis 34KLB.

[0020] In some embodiments, the Bacillus composition further comprises Bacillus amyloliquefaciens.

[0021] One aspect of the invention relates to a method of preparing a fermented composition of the soybean composition described herein, comprising: boiling the water in a container; adding the soybean and molasses to the boiling water; stirring the soybean and molasses for at least 20 minutes; cooling the soybean, molasses, and water to room temperature; mixing the mineral mixture, the enzyme, and the microbial mixture into the water, wherein the water is substantially free of stirring motions for at least 20 hours.

[0022] In some embodiments, the soybean and molasses are stirred for less than or equal to 30 minutes.

[0023] In some embodiments, the cooling step comprises contacting the container with ice.

[0024] In some embodiments, the water is substantially free of stirring motions for less than or equal to 48 hours.

[0025] One aspect of the invention relates to a fermented composition produced by the methods described herein.

[0026] One aspect of the invention relates to a method of inhibiting bacteria in water, the method comprising contacting water with a fermented composition described herein.

[0027] In some embodiments, the pathogenic bacteria is selected from Vibrio parahaemolyticus, Vibrio anguillarum, Vibrio harveyi. Vibrio vulnificus, Aliivibrio salmonicida, Photobacterium damselae, Aeromonas caviae, Aeromonas hydrophila, Aeromonas sobria, Aeromonas veronii, Aeromonas jandaei, Edwardsiella anguillarum, Edwardsiella ictaluri, Edwardsiella piscicida, Edwardsiella tarda, Yersinia ruckeri, Francisella noatunensis. Mycobacterium fortuitum, Mycobacterium marinum. Nocardia asteroidws, Nocardia crassostreae, Nocardia senolae, Streptococcus agalactiae, Streptococcus iniae, Lactococcus garvieae, Aerococcus viridans, Renibacterium salmoninarum, Enterobacterium catenabicterium, Clostridium botulinum. Piscirickettsia salmonis. Hepatobacter penaei, Francisella noatunensis, and Chlamydia spp.

[0028] In some embodiments, the water is used in aquaculture.

### BRIEF DESCRIPTION OF THE DRAWINGS

[0029] FIG. 1 shows fermentation of Bacillus subtilis 34KLB growth on tryptone soya agar (TSA).

[0030] FIG. 2 shows fermentation of lactic-acid-producing bacteria growth on De Man, Rogosa, and Sharpe (MRS) agar.

[0031] FIG. 3 is a graph showing how cooking of soybean meal and molasses reduces the background native microbial count as a function of time.

[0032] FIG. 4 shows inhibition of V. parahaemolyticus.

[0033] FIG. 5 shows inhibition of V. harveyi.

[0034] FIG. 6 shows inhibition of V. vulnificus.

[0035] FIG. 7 shows inhibition of V. cholera.

[0036] FIGS. 8A and 8B show inhibition of V. anguillarum.

[0037] FIG. 9 shows survival rate (%) 10-day post-challenge of LD₅₀ immersion challenge.

[0038] FIG. 10 shows survival rate (%) 10-day post-challenge of LD₈₀ immersion challenge.

### DETAILED DESCRIPTION OF THE INVENTION

[0039] One aspect of the present disclosure provides a composition comprising: water, soybean, molasses, a mineral mixture, an enzyme, and a microbial mixture that comprises a Bacillus composition.

[0040] In some embodiments, the soybean can include raw soybeans. In some embodiments, the soybean can include soybean meal. In some embodiments, the soybean can include a combination of raw soybeans and soybean meal.

[0041] In some embodiments, the soybean can have a weight percentage in the composition of at least about 10 wt %, at least about 12.5 wt %, at least about 15 wt %, at least about 17.5 wt %, at least about 20 wt %, at least about 22.5 wt %, at least about 25 wt %, or at least about 27.5 wt %. In some embodiments, the soybean can have a weight percentage in the composition of no more than about 45 wt %, no more than about 42.5 wt %, no more than about 40 wt %, no more than about 37.5 wt %, no more than about 35 wt %, no more than about 32.5 wt %, no more than about 30 wt %, no more than about 27.5 wt %, no more than about 25 wt %, no more than about 22.5 wt %, or no more than about 20 wt %.

[0042] Combinations of the above-referenced ranges for the weight percentage of the soybean are also possible (e.g., at least about 10 wt % to no more than about 45 wt %, or at least about 15 wt % to no more than about 40 wt %), inclusive of all values and ranges therebetween.

[0043] In some embodiments, the soybean can have a weight percentage in the composition of about 10 wt %, about 15 wt %, about 17.5 wt %, about 20 wt %, about 22.5 wt %, about 25 wt %, about 27.5 wt %, about 30 wt %, about 32.5 wt %, about 35 wt %, about 37.5 wt %, about 40 wt %, about 42.5 wt %, or about 45 wt %.

[0044] In some embodiments, the molasses can be pasteurized.

[0045] In some embodiments where raw soybeans are included in the composition, the molasses can have a weight percentage in the composition of at least about 0.5 wt %, at least about 0.6 wt %, at least about 0.7 wt %, at least about 0.8 wt %, at least about 0.9 wt %, at least about 1.0 wt %, at least about 1.1 wt %, at least about 1.2 wt %, or at least about 1.3 wt %. In some embodiments where raw soybeans are included in the composition, the molasses can have a weight percentage in the composition of no more than about 2.0 wt %, no more than about 1.9 wt %, no more than about 1.8 wt %, no more than about 1.7 wt %, no more than about 1.6 wt %, no more than about 1.5 wt %, no more than about 1.4 wt %, or no more than about 1.3 wt %.

[0046] Combinations of the above-referenced ranges for the weight percentage of the molasses in the composition having raw soybeans are also possible (e.g., at least about 0.5 wt % to no more than about 2.0 wt %, or at least about 1.0 wt % to no more than about 1.5 wt %), inclusive of all values and ranges therebetween.

[0047] In some embodiments where raw soybeans are included in the composition, the molasses can have a weight percentage in the composition of about 0.5 wt %, about 0.6 wt %, about 0.7 wt %, about 0.8 wt %, about 0.9 wt %, about 1.0 wt %, about 1.1 wt %, about 1.2 wt %, about 1.3 wt %, about 1.4 wt %, about 1.5 wt %, about 1.6 wt %, about 1.7 wt %, about 1.8 wt %, about 1.9 wt %, or about 2.0 wt %.

[0048] In some embodiments where soybean meal is included in the composition, the molasses can have a weight percentage in the composition of at least about 0.05 wt %, at least about 0.06 wt %, at least about 0.07 wt %, at least about 0.08 wt %, at least about 0.09 wt %, at least about 0.1 wt %, at least about 0.11 wt %, at least about 0.12 wt %, or at least about or 0.13 wt %. In some embodiments where soybean meal is included in the composition, the molasses can have a weight percentage in the composition of no more than about 0.2 wt %, no more than about 0.19 wt %, no more than about 0.18 wt %, no more than about 0.17 wt %, no more than about 0.16 wt %, no more than about 0.15 wt %, no more than about 0.14 wt %, or no more than about 0.13 wt %.

[0049] Combinations of the above-referenced ranges for the molasses concentration where soybean meal is included in the composition are also possible (e.g., at least about 0.05 wt % to no more than about 0.2 wt %, or at least about 0.1 wt % to no more than about 0.15 wt %), inclusive of all values and ranges therebetween.

[0050] In some embodiments where soybean meal is included in the composition, the molasses can have a concentration of about 0.05 wt %, about 0.06 wt %, about 0.07 wt %, about 0.08 wt %, about 0.09 wt %, about 0.1 wt %, about 0.11 wt %, about 0.12 wt %, about 0.13 wt %, about 0.14 wt %, about 0.15 wt %, about 0.16 wt %, about 0.17 wt %, about 0.18 wt %, about 0.19 wt %, or about 0.2 wt %.

[0051] In some embodiments, the raw soybeans and molasses can be present in the composition at a weight ratio of at least about 5:1, at least about 10:1, at least about 15:1, at least about 20:1, at least about 25:1, at least about 30:1, or at least about 35:1. In some embodiments, the raw soybeans and molasses can be present in the composition at a weight ratio of no more than about 40:1, no more than about 35:1, no more than about 30:1, no more than about 25:1, no more than about 20:1, no more than about 15:1, or no more than about 10:1.

[0052] Combinations of the above-referenced ranges for the weight ratio of raw soybeans over molasses are also possible (e.g., at least about 5:1 to no more than about 40:1, or at least about 10:1 to no more than about 30:1), inclusive of all values and ranges therebetween.

[0053] In some embodiments, the raw soybeans and molasses can be present in the composition at a weight ratio of about 5:1, about 10:1, about 15:1, about 20:1, about 25:1, about 30:1, about 35:1, or about 40:1.

[0054] In some embodiments, the soybean meal and molasses can be present in the composition at a weight ratio of at least about 100:1, at least about 110:1, at least about 120:1, at least about 130:1, at least about 140:1, at least about 150:1, at least about 160:1, at least about 170:1, at least about 180:1, at least about 190:1, or at least about 200:1. In some embodiments, the soybean meal and molasses can be present in the composition at a weight ratio of no more than about 300:1, no more than about 290:1, no more than about 280:1, no more than about 270:1, no more than about 260:1, no more than about 250:1, no more than about 240:1, no more than about 230:1, no more than about 220:1, no more than about 210:1, or no more than about 200:1.

[0055] Combinations of the above-referenced ranges for the weight ratio of soybean meal over molasses are also possible (e.g., at least about 100:1 to no more than about 300:1, or at least about 150:1 to no more than about 250:1), inclusive of all values and ranges therebetween.

[0056] In some embodiments, the soybean meal and molasses can be present in the composition at a weight ratio of about 100:1, about 110:1, about 120:1, about 130:1, about 140:1, about 150:1, about 160:1, about 170:1, about 180:1, about 190:1, about 200:1, about 210:1, about 220:1, about 230:1, about 240:1, about 250:1, about 260:1, about 270:1, about 280:1, about 290:1, or about 300:1.

[0057] In some embodiments where raw soybeans are included in the composition, the mineral mixture can be present in the composition at a weight percentage of at least about 0.01 wt %, at least about 0.02 wt %, at least about 0.03 wt %, at least about 0.04 wt %, at least about 0.05 wt %, at least about 0.06 wt %, or at least about 0.07 wt %. In some embodiments where raw soybeans are included in the composition, the mineral mixture can be present in the composition at a weight percentage of no more than about 0.2 wt %, no more than about 0.19 wt %, no more than about 0.18 wt %, no more than about 0.17 wt %, no more than about 0.16 wt %, no more than about 0.15 wt %, no more than about 0.14 wt %, no more than about 0.13 wt %, no more than about 0.12 wt %, no more than about 0.11 wt %, or no more than about 0.10 wt %.

[0058] Combinations of the above-referenced ranges for the weight percentage of the mineral mixture in the composition where raw soybeans are included are also possible (e.g., at least about 0.01 wt % to no more than about 0.2 wt %, or at least about 0.15 wt % to no more than about 0.25 wt %), inclusive of all values and ranges therebetween.

[0059] In some embodiments where raw soybeans are included in the composition, the mineral mixture can be present in the composition at about 0.01 wt %, about 0.02 wt %, about 0.03 wt %, about 0.04 wt %, about 0.05 wt %, about 0.06 wt %, about 0.07 wt %, about 0.08 wt %, about 0.09 wt %, about 0.1 wt %, about 0.11 wt %, about 0.12 wt %, about 0.13 wt %, about 0.14 wt %, about 0.15 wt %, about 0.16 wt %, about 0.17 wt %, about 0.18 wt %, about 0.19 wt %, or about 0.2 wt %.

[0060] In some embodiments where soybean meal is included in the composition, the mineral mixture can be present in the composition at a weight percentage of at least about 0.0001 wt %, at least about 0.00015 wt %, at least about 0.0002 wt %, at least about 0.00025 wt %, at least about 0.0003 wt %, at least about 0.00035 wt %, at least about 0.0004 wt %, or at least about 0.00045 wt %. In some embodiments where soybean meal is included in the composition, the mineral mixture can be present in the composition at a weight percentage of no more than about 0.0006 wt %, no more than about 0.0005 wt %, no more than about 0.00045 wt %, no more than about 0.0004 wt %, no more than about 0.00035 wt %, or no more than about 0.0003 wt %.

[0061] Combinations of the above-referenced ranges for the weight percentage of the mineral mixture in the composition where soybean meal is included are also possible (e.g., at least about 0.0001 wt % to no more than about 0.0006 wt %, or at least about 0.0002 wt % to no more than about 0.0004 wt %), inclusive of all values and ranges therebetween.

[0062] In some embodiments where soybean meal is included in the composition, the mineral mixture can be present in the composition at about 0.0001 wt %, about 0.00015 wt %, about 0.0002 wt %, about 0.00025 wt %, about 0.0003 wt %, about 0.00035 wt %, about 0.0004 wt %, about 0.00045 wt %, or about 0.0005 wt %.

[0063] In some embodiments, the mineral mixture can include dipotassium phosphate, calcium propionate, gemstone manganese, gemstone iron, gemstone copper, gemstone zinc, selenium yeast 3000, cobalt sulfate monohydrate, or any combination thereof.

[0064] In some embodiments, the mineral mixture can include at least about 50 wt % dipotassium phosphate, at least about 52 wt % dipotassium phosphate, at least about 54 wt % dipotassium phosphate, at least about 56 wt % dipotassium phosphate, at least about 58 wt % dipotassium phosphate, at least about 60 wt % dipotassium phosphate, at least about 62 wt % dipotassium phosphate, at least about 64 wt % dipotassium phosphate, at least about 66 wt % dipotassium phosphate, or at least about 68 wt % dipotassium phosphate. In some embodiments, the mineral mixture can include no more than about 70 wt % dipotassium phosphate, no more than about 68 wt % dipotassium phosphate, no more than about 66 wt % dipotassium phosphate, no more than about 64 wt % dipotassium phosphate, no more than about 62 wt % dipotassium phosphate, no more than about 60 wt % dipotassium phosphate, no more than about 58 wt % dipotassium phosphate, no more than about 56 wt % dipotassium phosphate, no more than about 54 wt % dipotassium phosphate, or no more than about 52 wt % dipotassium phosphate.

[0065] Combinations of the above-referenced ranges for the weight ratio of dipotassium phosphate in the mineral mixture are also possible (e.g., at least about 50 wt % to no more than about 70 wt %, or at least about 54 wt % to no more than about 66 wt %), inclusive of all values and ranges therebetween.

[0066] In some embodiments, the mineral mixture can include about 50 wt % dipotassium phosphate, about 52 wt % dipotassium phosphate, about 54 wt % dipotassium phosphate, about 56 wt % dipotassium phosphate, about 58 wt % dipotassium phosphate, about 60 wt % dipotassium phosphate, about 62 wt % dipotassium phosphate, about 64 wt % dipotassium phosphate, about 66 wt % dipotassium phosphate, about 68 wt % dipotassium phosphate, or about 70 wt % dipotassium phosphate.

[0067] In some embodiments, the mineral mixture can include at least about 10 wt % calcium propionate, at least about 12 wt % calcium propionate, at least about 14 wt % calcium propionate, at least about 16 wt % calcium propionate, at least about 18 wt % calcium propionate, at least about 20 wt % calcium propionate, at least about 22 wt % calcium propionate, at least about 24 wt % calcium propionate, at least about 26 wt % calcium propionate, or at least about 28 wt % calcium propionate. In some embodiments, the mineral mixture can include no more than about 30 wt % calcium propionate, no more than about 28 wt % calcium propionate, no more than about 26 wt % calcium propionate, no more than about 24 wt % calcium propionate, no more than about 22 wt % calcium propionate, no more than about 20 wt % calcium propionate, no more than about 18 wt % calcium propionate, no more than about 16 wt % calcium propionate, no more than about 14 wt % calcium propionate, or no more than about 12 wt % calcium propionate.

[0068] Combinations of the above-referenced ranges for the weight ratio of calcium propionate in the mineral mixture are also possible (e.g., at least about 12 wt % to no more than about 30 wt %, or at least about 14 wt % to no more than about 28 wt %), inclusive of all values and ranges therebetween.

[0069] In some embodiments, the mineral mixture can include about 10 wt % calcium propionate, about 12 wt % calcium propionate, about 14 wt % calcium propionate, about 16 wt % calcium propionate, about 18 wt % calcium propionate, about 20 wt % calcium propionate, about 22 wt % calcium propionate, about 24 wt % calcium propionate, about 26 wt % calcium propionate, about 28 wt % calcium propionate, or about 30 wt % calcium propionate.

[0070] In some embodiments, the mineral mixture can include at least about 2 wt % gemstone manganese, at least about 2.5 wt % gemstone manganese, at least about 3 wt % gemstone manganese, at least about 3.5 wt % gemstone manganese, at least about 4 wt % gemstone manganese, at least about 4.5 wt % gemstone manganese, at least about 5 wt % gemstone manganese, at least about 5.5 wt % gemstone manganese, at least about 6 wt % gemstone manganese, at least about 6.5 wt % gemstone manganese. In some embodiments, the mineral mixture can include no more than about 7 wt % gemstone manganese, no more than about 6.5 wt % gemstone manganese, no more than about 6 wt % gemstone manganese, no more than about 5.5 wt % gemstone manganese, no more than about 5 wt % gemstone manganese, no more than about 4.5 wt % gemstone manganese, no more than about 4 wt % gemstone manganese, no more than about 3.5 wt % gemstone manganese, no more than about 3 wt % gemstone manganese, or no more than about 2.5 wt % gemstone manganese.

[0071] Combinations of the above-referenced ranges for the weight ratio of gemstone manganese in the mineral mixture are also possible (e.g., at least about 2 wt % to no more than about 7 wt %, or at least about 3 wt % to no more than about 6 wt %), inclusive of all values and ranges therebetween.

[0072] In some embodiments, the mineral mixture can include about 2 wt % gemstone manganese, about 2.5 wt % gemstone manganese, about 3 wt % gemstone manganese, about 3.5 wt % gemstone manganese, about 4 wt % gemstone manganese, about 4.5 wt % gemstone manganese, about 5 wt % gemstone manganese, about 5.5 wt % gemstone manganese, about 6 wt % gemstone manganese, about 6.5 wt % gemstone manganese, or about 7 wt % gemstone manganese.

[0073] In some embodiments, the mineral mixture can include at least about 2 wt % gemstone iron, at least about 2.2 wt % gemstone iron, at least about 2.4 wt % gemstone iron, at least about 2.6 wt % gemstone iron, at least about 2.8 wt % gemstone iron, at least about 3 wt % gemstone iron, at least about 3.1 wt % gemstone iron, at least about 3.2 wt % gemstone iron, at least about 3.4 wt % gemstone iron, at least about 3.6 wt % gemstone iron, or at least about 3.8 wt % gemstone iron. In some embodiments, the mineral mixture can include no more than about 4 wt % gemstone iron, no more than about 3.8 wt % gemstone iron, no more than about 3.6 wt % gemstone iron, no more than about 3.4 wt % gemstone iron, no more than about 3.2 wt % gemstone iron, no more than about 3.1 wt % gemstone iron, no more than about 3 wt % gemstone iron, no more than about 2.8 wt % gemstone iron, no more than about 2.6 wt % gemstone iron, no more than about 2.4 wt % gemstone iron, or no more than about 2.2 wt % gemstone iron.

[0074] Combinations of the above-referenced ranges for the weight ratio of gemstone iron in the mineral mixture are also possible (e.g., at least about 2 wt % to no more than about 4 wt %, or at least about 2.2 wt % to no more than about 3.8 wt %), inclusive of all values and ranges therebetween.

[0075] In some embodiments, the mineral mixture can include about 2 wt % gemstone iron, about 2.2 wt % gemstone iron, about 2.4 wt % gemstone iron, about 2.6 wt % gemstone iron, about 2.8 wt % gemstone iron, about 3 wt % gemstone iron, about 3.1 wt % gemstone iron, about 3.2% gemstone iron, about 3.4% gemstone iron, about 3.6% gemstone iron, about 3.8 wt % gemstone iron, or about 4 wt % gemstone iron.

[0076] In some embodiments, the mineral mixture can include at least about 2 wt % gemstone copper, at least about 2.2 wt % gemstone copper, at least about 2.4 wt % gemstone copper, at least about 2.6 wt % gemstone copper, at least about 2.8 wt % gemstone copper, at least about 3 wt % gemstone copper, at least about 3.2 wt % gemstone copper, at least about 3.4 wt % gemstone copper, at least about 3.6 wt % gemstone copper, or at least about 3.8 wt % gemstone copper. In some embodiments, the mineral mixture can include no more than about 4 wt % gemstone copper, no more than about 3.8 wt % gemstone copper, no more than about 3.6 wt % gemstone copper, no more than about 3.4 wt % gemstone copper, no more than about 3.2 wt % gemstone copper, no more than about 3 wt % gemstone copper, no more than about 2.8 wt % gemstone copper, no more than about 2.6 wt % gemstone copper, no more than about 2.4 wt % gemstone copper, or no more than about 2.2 wt % gemstone copper.

[0077] Combinations of the above-referenced ranges for the weight ratio of gemstone copper in the mineral mixture are also possible (e.g., at least about 2 wt % to no more than about 4 wt %, or at least about 2.2 wt % to no more than about 3.8 wt %), inclusive of all values and ranges therebetween.

[0078] In some embodiments, the mineral mixture can include about 2 wt % gemstone copper, about 2.2 wt % gemstone copper, about 2.4 wt % gemstone copper, about 2.6 wt % gemstone copper, about 2.8 wt % gemstone copper, about 3 wt % gemstone copper, about 3.2 wt % gemstone copper, about 3.4 wt % gemstone copper, about 3.6 wt % gemstone copper, about 3.8 wt % gemstone copper, or about 4 wt % gemstone copper.

[0079] In some embodiments, the mineral mixture can include at least about 2 wt % gemstone zinc, at least about 2.2 wt % gemstone zinc, at least about 2.4 wt % gemstone zinc, at least about 2.6 wt % gemstone zinc, at least about 2.7 wt % gemstone zinc, at least about 2.8 wt % gemstone zinc, at least about 3 wt % gemstone zinc, at least about 3.2 wt % gemstone zinc, at least about 3.4 wt % gemstone zinc, at least about 3.6 wt % gemstone zinc, at least about 3.8 wt % gemstone zinc. In some embodiments, the mineral mixture can include no more than about 4 wt % gemstone zinc, no more than about 3.8 wt % gemstone zinc, no more than about 3.6 wt % gemstone zinc, no more than about 3.4 wt % gemstone zinc, no more than about 3.2 wt % gemstone zinc, no more than about 3 wt % gemstone zinc, no more than about 2.8 wt % gemstone zinc, no more than about 2.7 wt % gemstone zinc, no more than about 2.6 wt % gemstone zinc, no more than about 2.4 wt % gemstone zinc, or no more than about 2.2 wt % gemstone zinc.

[0080] Combinations of the above-referenced ranges for the weight ratio of gemstone zinc in the mineral mixture are also possible (e.g., at least about 2 wt % to no more than about 4 wt %, or at least about 2.2 wt % to no more than about 3.8 wt %), inclusive of all values and ranges therebetween.

[0081] In some embodiments, the mineral mixture can include about 2 wt % gemstone zinc, about 2.2 wt % gemstone zinc, about 2.4 wt % gemstone zinc, about 2.6 wt % gemstone zinc, about 2.7 wt % gemstone zinc, about 2.8 wt % gemstone zinc, about 3 wt % gemstone zinc, about 3.2 wt % gemstone zinc, about 3.4 wt % gemstone zinc, about 3.6 wt % gemstone zinc, about 3.8 wt % gemstone zinc, or about 4 wt % gemstone zinc.

[0082] In some embodiments, the mineral mixture can include at least about 2 wt % selenium yeast 3000, at least about 2.2 wt % selenium yeast 3000, at least about 2.4 wt % selenium yeast 3000, at least about 2.6 wt % selenium yeast 3000, at least about 2.67 wt % selenium yeast 3000, at least about 2.8 wt % selenium yeast 3000, at least about 3 wt % selenium yeast 3000, at least about 3.2 wt % selenium yeast 3000, at least about 3.4 wt % selenium yeast 3000, at least about 3.6 wt % selenium yeast 3000, at least about 3.8 wt % selenium yeast 3000. In some embodiments, the mineral mixture can include no more than about 4 wt % selenium yeast 3000, no more than about 3.8 wt % selenium yeast 3000, no more than about 3.6 wt % selenium yeast 3000, no more than about 3.4 wt % selenium yeast 3000, no more than about 3.2 wt % selenium yeast 3000, no more than about 3 wt % selenium yeast 3000, no more than about 2.8 wt % selenium yeast 3000, no more than about 2.67 wt % selenium yeast 3000, no more than about 2.6 wt % selenium yeast 3000, no more than about 2.4 wt % selenium yeast 3000, or no more than about 2.2 wt % selenium yeast 3000.

[0083] Combinations of the above-referenced ranges for the weight ratio of selenium yeast 3000 in the mineral mixture are also possible (e.g., at least about 2 wt % to no more than about 4 wt %, or at least about 2.2 wt % to no more than about 3.8 wt %), inclusive of all values and ranges therebetween.

[0084] In some embodiments, the mineral mixture can include about 2 wt % selenium yeast 3000, about 2.2 wt % selenium yeast 3000, about 2.4 wt % selenium yeast 3000, about 2.6 wt % selenium yeast 3000, about 2.67 wt % selenium yeast 3000, about 2.8 wt % selenium yeast 3000, about 3 wt % selenium yeast 3000, about 3.2 wt % selenium yeast 3000, about 3.4 wt % selenium yeast 3000, about 3.6 wt % selenium yeast 3000, about 3.8 wt % selenium yeast 3000, or about 4 wt % selenium yeast 3000.

[0085] In some embodiments, the mineral mixture can include at least about 0.01 wt % cobalt sulfate monohydrate, at least about 0.02 wt % cobalt sulfate monohydrate, at least about 0.03 wt % cobalt sulfate monohydrate, at least about 0.04 wt % cobalt sulfate monohydrate, at least about 0.05 wt % cobalt sulfate monohydrate, at least about 0.06 wt % cobalt sulfate monohydrate, at least about 0.07 wt % cobalt sulfate monohydrate, at least about 0.08 wt % cobalt sulfate monohydrate, at least about 0.09 wt % cobalt sulfate monohydrate, or at least about 0.1 wt % cobalt sulfate monohydrate. In some embodiments, the mineral mixture can include no more than about 0.15 wt % cobalt sulfate monohydrate, no more than about 0.1 wt % cobalt sulfate monohydrate, no more than about 0.09 wt % cobalt sulfate monohydrate, no more than about 0.08 wt % cobalt sulfate monohydrate, no more than about 0.07 wt % cobalt sulfate monohydrate, no more than about 0.06 wt % cobalt sulfate monohydrate, no more than about 0.05 wt % cobalt sulfate monohydrate, no more than about 0.04 wt % cobalt sulfate monohydrate, no more than about 0.03 wt % cobalt sulfate monohydrate, or no more than about 0.02 wt % cobalt sulfate monohydrate.

[0086] Combinations of the above-referenced ranges for the weight ratio of cobalt sulfate monohydrate in the mineral mixture are also possible (e.g., at least about 0.01 wt % to no more than about 0.15 wt %, or at least about 0.05 wt % to no more than about 0.1 wt %), inclusive of all values and ranges therebetween.

[0087] In some embodiments, the mineral mixture can include about 0.01 wt % cobalt sulfate monohydrate, about 0.02 wt %,% cobalt sulfate monohydrate, about 0.03 wt % cobalt sulfate monohydrate, about 0.04 wt % cobalt sulfate monohydrate, about 0.05 wt % cobalt sulfate monohydrate, about 0.06 wt % cobalt sulfate monohydrate, about 0.07 wt %,% cobalt sulfate monohydrate, about 0.08 wt % cobalt sulfate monohydrate, about 0.09 wt % cobalt sulfate monohydrate, about 0.1 wt % cobalt sulfate monohydrate, or about 0.15 wt % cobalt sulfate monohydrate.

[0088] In some embodiments, the enzyme can include phytase, protease, amylase, cellobiohydrolase, endoglucanase, exoglucanase, lipase, or any combination thereof. In some embodiments, the enzyme can be in the form of a dried powder, wherein the dried powder includes the enzyme and a diluent. In some embodiments, the dried powder can have a weight percentage in the composition of at least about 0.01 wt %, at least about 0.02 wt %, at least about 0.03 wt %, at least about 0.04 wt %, at least about 0.05 wt %, at least about 0.06 wt %, at least about 0.07 wt %, at least about 0.08 wt %, at least about 0.09 wt %, at least about 0.1 wt %, at least about 0.11 wt %, at least about 0.12 wt %, at least about 0.13 wt %, at least about 0.14 wt %, at least about 0.15 wt %, at least about 0.16 wt %, at least about 0.17 wt %, at least about 0.18 wt %, or at least about 0.19 wt %. In some embodiments, the dried powder can have a weight percentage in the composition of no more than about 0.2 wt %, no more than about 0.19 wt %, no more than about 0.18 wt %, no more than about 0.17 wt %, no more than about 0.16 wt %, no more than about 0.15 wt %, no more than about 0.14 wt %, no more than about 0.13 wt %, no more than about 0.12 wt %, no more than about 0.11 wt %, no more than about 0.1 wt %, no more than about 0.09 wt %, no more than about 0.08 wt %, no more than about 0.07 wt %, no more than about 0.06 wt %, no more than about 0.05 wt %, no more than about 0.04 wt %, no more than about 0.03 wt %, or no more than about 0.02 wt %.

[0089] Combinations of the above-referenced ranges for the weight percentage of the dried powder in the composition are also possible (e.g., at least about 0.01 wt % to no more than about 0.2 wt %, or at least about 0.05 wt % to no more than about 0.15 wt %), inclusive of all values and ranges therebetween.

[0090] In some embodiments, the dried powder can have a weight percentage in the composition of about 0.01 wt %, about 0.02 wt %, about 0.03 wt %, about 0.04 wt %, about 0.05 wt %, about 0.06 wt %, about 0.07 wt %, about 0.08 wt %, about 0.09 wt %, about 0.1 wt %, about 0.11 wt %, about 0.12 wt %, about 0.13 wt %, about 0.14 wt %, about 0.15 wt %, about 0.16 wt %, about 0.17 wt %, about 0.18 wt %, about 0.19 wt %, or about 0.2 wt %.

[0091] In some embodiments, the microbial mixture can further include a mixture of lactic-acid-producing bacteria. The mixture of lactic-acid-producing bacteria can include Lactobacillus plantarum, Pediococcus acidilactici, Pediococcus pentosaceus, or any combination thereof. In some embodiments, the mixture of lactic-acid-producing bacteria can include Lactobacillus plantarum, Pediococcus acidilactici, and Pediococcus pentosaceus. In some embodiments, the Lactobacillus plantarum, Pediococcus acidilactici, and Pediococcus pentosaceus can be present at a ratio of about 1:1:1 by CFU.

[0092] In some embodiments, the mixture of lactic-acid-producing bacteria can have a total microbial titer (i.e., inclusive of each lactic-acid-producing bacteria species) in the microbial mixture of at least about 1*10¹⁰ CFU/g, at least about 2*10¹⁰ CFU/g, at least about 3*10¹⁰ CFU/g, at least about 4*10¹⁰ CFU/g, at least about 5*10¹⁰ CFU/g, at least about 6*10¹⁰ CFU/g, at least about 7*10¹⁰ CFU/g, at least about 8*10¹⁰ CFU/g, at least about 9*10¹⁰ CFU/g, at least about 1*10¹¹ CFU/g, at least about 1.1*10¹¹ CFU/g, at least about 1.2*10¹¹ CFU/g, at least about 1.3*10¹¹ CFU/g, at least about 1.4*10¹¹ CFU/g, at least about 1.5*10¹¹ CFU/g, at least about 1.6*10¹¹ CFU/g, at least about 1.7*10¹¹ CFU/g, at least about 1.8*10¹¹ CFU/g, at least about 1.9*10¹¹ CFU/g, or at least about 2*10¹¹ CFU/g. In some embodiments, the mixture of lactic-acid-producing bacteria can have a total microbial titer (i.e., inclusive of each lactic-acid-producing bacteria species) in the microbial mixture of no more than about 1*10¹³ CFU/g, no more than about 1*10¹² CFU/g, no more than about 5*10¹¹ CFU/g, no more than about 4*10¹¹ CFU/g, no more than about 3*10¹¹ CFU/g, or no more than about 2*10¹¹ CFU/g.

[0093] Combinations of the above-referenced ranges for the lactic-acid-producing bacteria concentration are also possible (e.g., at least about 1*10¹⁰ CFU/g to no more than about 1*10¹³ CFU/g, or at least about 2*10¹⁰ CFU/g to no more than about 1*10¹² CFU/g), inclusive of all values and ranges therebetween.

[0094] In some embodiments, the Bacillus composition can include Bacillus subtilis (e.g., Bacillus subtilis 34KLB), Bacillus lichenmforis, Bacillus pumilus, Bacillus amyloliquefaciens, Bacillus mojavensis, or any combination thereof. In some embodiments, the Bacillus composition consists of Bacillus subtilis 34KLB. In some embodiments, the Bacillus composition includes Bacillus subtilis 34KLB and Bacillus amyloliquefaciens.

[0095] The sequence of Bacillus subtilis 34 KLB can include one or a combination of SEQ ID NOs. 1-18. Table 1 includes the Bacillus subtilis 34 KLB contig numbers in relation to SEQ ID NOs. The contig numbers and the related sequences are produced from sequencing the Bacillus subtilis 34 KLB genome. In some embodiments, the genome sequence of Bacillus subtilis 34 KLB can include all the sequences in Table 1. In some embodiments, the genome sequence of Bacillus subtilis 34 KLB can include all the sequences in Table 1 in the order specified by the contig numbers.

TABLE 1
Contig number ordering

| SEQ ID NO | Contig Number |
|---|---|
| 1 | 19 |
| 2 | 11 |
| 3 | 18 |
| 4 | 14 |
| 5 | 22 |
| 6 | 21 |
| 7 | 3 |
| 8 | 9 |
| 9 | 2 |
| 10 | 10 |
| 11 | 13 |
| 12 | 6 |
| 13 | 15 |
| 14 | 5 |
| 15 | 4 |
| 16 | 1 |
| 17 | 16 |
| 18 | 20 |

[0096] In some embodiments, the sequence of Bacillus subtilis 34 KLB can include a sequence that is at least about 95%, at least about 95.2%, at least about 95.4%, at least about 95.6%, at least about 95.8%, at least about 96%, at least about 96.2%, at least about 96.4%, at least about 96.6%, at least about 96.8%, at least about 97%, at least about 97.2%, at least about 97.4%, at least about 97.6%, at least about 97.8%, at least about 98%, at least about 98.2%, at least about 98.4%, at least about 98.6%, at least about 98.8%, or at least about 99% similar to a sequence selected from SEQ ID No. 1-18.

[0097] In some embodiments, the Bacillus composition can have a total microbial titer (i.e., inclusive of each Bacillus species) in the microbial mixture of at least about 1*10⁶ CFU/g, at least about 1*10⁷ CFU/g, at least about 1*10⁸ CFU/g, at least about 1*10⁹ CFU/g, at least about 1*10¹⁰ CFU/g, at least about 2*10¹⁰ CFU/g, at least about 3*10¹⁰ CFU/g, at least about 4*10¹⁰ CFU/g, at least about 5*10¹⁰ CFU/g, at least about 6*10¹⁰ CFU/g, at least about 7*10¹⁰ CFU/g, at least about 8*10¹⁰ CFU/g, at least about 9*10¹⁰ CFU/g, at least about 1*10¹⁰ CFU/g, at least about 1.1*10¹¹ CFU/g, at least about 1.2*10¹¹ CFU/g, at least about 1.3*10¹¹ CFU/g, at least about 1.4*10¹¹ CFU/g, at least about 1.5*10¹¹ CFU/g, at least about 1.6*10¹¹ CFU/g, at least about 1.7*10¹¹ CFU/g, at least about 1.8*10¹¹ CFU/g, at least about 1.9*10¹¹ CFU/g, or at least about 2*10¹¹ CFU/g.

[0098] In some embodiments, the Bacillus composition can have a total microbial titer (i.e., inclusive of each Bacillus species) in the microbial mixture of no more than about 1*10¹² CFU/g, no more than about 5*10¹¹ CFU/g, no more than about 1*10¹¹ CFU/g, no more than about 9*10¹⁰ CFU/g, no more than about 8*10¹⁰ CFU/g, no more than about 7*10¹⁰ CFU/g, no more than about 6*10¹⁰ CFU/g, no more than about 5*10¹⁰ CFU/g, no more than about 4*10¹⁰ CFU/g, no more than about 3*10¹⁰ CFU/g, no more than about 2*10¹⁰ CFU/g, or no more than about 1*10¹⁰ CFU/g.

[0099] Combinations of the above-referenced ranges for the Bacillus concentration are also possible (e.g., at least about 1*10¹¹ CFU/g to no more than about 1*10¹² CFU/g, or at least about 1*10⁷ CFU/g to no more than about 1*10¹¹ CFU/g), inclusive of all values and ranges therebetween.

[0100] In some embodiments where raw soybeans are included in the composition, the microbial mixture can have a weight percentage in the composition of at least about 0.05 wt %, at least about 0.1 wt %, at least about 0.15 wt %, at least about 0.2 wt %, at least about 0.25 wt %, at least about 0.3 wt %, at least about 0.35 wt %, at least about 0.4 wt %, at least about 0.45 wt %, at least about 0.5 wt %, at least about 0.55 wt %, at least about 0.6 wt %, at least about 0.65 wt %. In some embodiments where raw soybeans are included in the composition, the microbial mixture can have a weight percentage in the composition of no more than about 0.7 wt %, no more than about 0.65 wt %, no more than about 0.6 wt %, no more than about 0.55 wt %, no more than about 0.5 wt %, no more than about 0.45 wt %, no more than about 0.4 wt %, no more than about 0.35 wt %, no more than about 0.3 wt %, no more than about 0.25 wt %, no more than about 0.2 wt %, or no more than about 0.1 wt %.

[0101] Combinations of the above-referenced ranges for the weight percentage of the microbial mixture in the composition where raw soybeans are included are also possible (e.g., at least about 0.05 wt % to no more than about 0.7 wt %, or at least about 0.1 wt % to no more than about 0.5 wt %), inclusive of all values and ranges therebetween.

[0102] In some embodiments where raw soybeans are included in the composition, the microbial mixture can have a weight percentage in the composition of about 0.05 wt %, about 0.1 wt %, about 0.15 wt %, about 0.2 wt %, about 0.25 wt %, about 0.3 wt %, about 0.35 wt %, about 0.4 wt %, about 0.45 wt %, about 0.5 wt %, about 0.55 wt %, about 0.6 wt %, about 0.65 wt %, or about 0.7 wt %.

[0103] In some embodiments where soybean meal is included in the composition, the microbial mixture can have a weight percentage in the composition of at least about 0.0005 wt %, at least about 0.0006 wt %, at least about 0.0007 wt %, at least about 0.0008 wt %, at least about 0.0009 wt %, at least about 0.001 wt %, at least about 0.0011 wt %, at least about 0.0012 wt %, at least about 0.0013 wt %, at least about 0.0014 wt %, at least about 0.0015 wt %, at least about 0.0016 wt %, at least about 0.0017 wt %, at least about 0.0018 wt %, or at least about 0.0019 wt %. In some embodiments where soybean meal is included in the composition, the microbial mixture can have a weight percentage in the composition of no more than about 0.002 wt %, no more than about 0.0019 wt %, no more than about 0.0018 wt %, no more than about 0.0017 wt %, no more than about 0.0016 wt %, no more than about 0.0015 wt %, no more than about 0.0014 wt %, no more than about 0.0013 wt %, no more than about 0.0012 wt %, no more than about 0.0011 wt %, no more than about 0.001 wt %, no more than about 0.0009 wt %, no more than about 0.0008 wt %, no more than about 0.0007 wt %, or no more than about 0.0006 wt %.

[0104] Combinations of the above-referenced ranges for the weight percentage of the microbial mixture the composition where soybean meal is included are also possible (e.g., at least about 0.0005 wt % to no more than about 0.002 wt %, or at least about 0.001 wt % to no more than about 0.0015 wt %), inclusive of all values and ranges therebetween.

[0105] In some embodiments where soybean meal is included in the composition, the microbial mixture can have a weight percentage in the composition of about 0.0005 wt %, about 0.0006 wt %, about 0.0007 wt %, about 0.0008 wt %, about 0.0009 wt %, about 0.001 wt %, about 0.0011 wt %, about 0.0012 wt %, about 0.0013 wt %, about 0.0014 wt %, about 0.0015 wt %, about 0.0016 wt %, about 0.0017 wt %, about 0.0018 wt %, about 0.0019 wt %, or about 0.002 wt %.

[0106] In some embodiments, the microbial mixture can include a water-soluble diluent. In some embodiments, the water-soluble diluent can include dextrose monohydrate, diatomaceous earth, anhydrous dextrose, sucrose, maltose, maltodextrin, sodium chloride, potassium chloride, calcium chloride, magnesium chloride, sodium sulfate, potassium sulfate, magnesium sulfate, oat beta glucan, potassium carbonate, sodium bicarbonate, and sodium carbonate, or any combination thereof. In some embodiments, the water-soluble diluent can include dextrose monohydrate and diatomaceous earth.

[0107] In some embodiments, the microbial mixture can include at least about 80 wt % water-soluble diluent, at least about 85 wt % water-soluble diluent, at least about 90 wt % water-soluble diluent, or at least about 95 wt % water-soluble diluent. In some embodiments, the microbial mixture can include no more than about 99 wt % water-soluble diluent, no more than about 98 wt % water-soluble diluent, no more than about 97 wt % water-soluble diluent, no more than about 96 wt % water-soluble diluent, no more than about 95 wt % water-soluble diluent, no more than about 94 wt % water-soluble diluent, no more than about 93 wt % water-soluble diluent, no more than about 92 wt % water-soluble diluent, or no more than about 91 wt % water-soluble diluent.

[0108] Combinations of the above-referenced ranges for the weight percentage of water-soluble diluent in the microbial mixture are also possible (e.g., at least about 80 wt % to no more than about 99 wt %, or at least about 85 wt % to no more than about 95 wt %), inclusive of all values and ranges therebetween.

[0109] In some embodiments, the microbial mixture can include about 90 wt % water-soluble diluent, about 91 wt % water-soluble diluent, about 92 wt % water-soluble diluent, about 93 wt % water-soluble diluent, about 94 wt % water-soluble diluent, about 95 wt % water-soluble diluent, about 96 wt % water-soluble diluent, about 97 wt % water-soluble diluent, about 98 wt % water-soluble diluent, or about 99 wt % water-soluble diluent.

[0110] In some embodiments, the weight ratio of water, raw soybean, molasses, the mineral mixture, and the microbial mixture can be about 3000:1000:50:2.5:5. In some embodiments, the weight ratio of water, soybean meal, molasses, the mineral mixture, and the microbial mixture can be about 1000:167:1.25:0.003:0.013.

[0111] One aspect of the disclosure relates to a method of preparing a fermented composition of the composition described herein, comprising: boiling the water in a container; adding the soybean and molasses to the boiling water; stirring the soybean and molasses in the water; cooling the soybean, molasses, and water to room temperature; mixing the mineral mixture, the enzyme, and the microbial mixture into the water, wherein the water is substantially free of stirring motions for a time period.

[0112] In some embodiments, the soybean and molasses can be stirred in the boiling water for at least about 5 minutes, at least about 10 minutes, at least about 15 minutes, at least about 20 minutes, at least about 25 minutes, at least about 30 minutes, at least about 35 minutes, at least about 40 minutes, or at least about 45 minutes. In some embodiments, the soybean and molasses can be stirred in the water for less than about 60 minutes, less than about 40 minutes, less than about 35 minutes, less than about 30 minutes, less than about 20 minutes, less than about 15 minutes, less than about 10 minutes, or less than about 5 minutes.

[0113] Combinations of the above-referenced ranges for the stirring time are also possible (e.g., at least about 5 minutes to less than about 60 minutes, or at least about 20 minutes to less than about 40 minutes), inclusive of all values and ranges therebetween.

[0114] In some embodiments, the soybean and molasses can be stirred in the water for about 5 minutes, about 10 minutes, about 15 minutes, about 20 minutes, about 25 minutes, about 30 minutes, about 35 minutes, about 40 minutes, or about 45 minutes.

[0115] In some embodiments, the soybean, molasses, and water can be cooled to room temperature over a time period of at least about 1 minute, at least about 2 minutes, at least about 3 minutes, at least about 4 minutes, at least about 5 minutes, at least about 10 minutes, at least about 15 minutes, at least about 20 minutes, at least about 25 minutes, at least about 30 minutes, at least about 35 minutes, or at least about 40 minutes. In some embodiments, the soybean, molasses, and water can be cooled to room temperature over a time period of no more than about 45 minutes, no more than about 40 minutes, no more than about 35 minutes, no more than about 30 minutes, no more than about 25 minutes, no more than about 20 minutes, no more than about 15 minutes, no more than about 10 minutes, no more than about 5 minutes, no more than about 4 minutes, no more than about 3 minutes, no more than about 2 minutes.

[0116] Combinations of the above-referenced ranges for the time period for cooling are also possible (e.g., at least about 1 minute to no more than about 45 minutes, or at least about 5 minutes to no more than about 40 minutes), inclusive of all values and ranges therebetween.

[0117] In some embodiments, the soybean, molasses, and water can be cooled to room temperature over a time period of about 1 minute, about 2 minutes, about 3 minutes, about 4 minutes, about 5 minutes, about 10 minutes, about 15 minutes, about 20 minutes, about 25 minutes, about 30 minutes, about 35 minutes, about 40 minutes, or about 45 minutes. In some embodiments, the soybean, molasses, and water can be cooled to room temperature in the presence of ice or cooling water.

[0118] In some embodiments, the mineral mixture, enzyme, and microbial mixture can be added to the soybean, molasses, and water before cooling the soybean, molasses, and water to room temperature. In some embodiments, the mineral mixture, enzyme, and microbial mixture can be added to the soybean, molasses, and water after cooling the soybean, molasses, and water to room temperature.

[0119] After the mineral mixture, enzyme, and microbial mixture are added to the soybean, molasses, and water, the water is substantially free of stirring motions for a time period of at least about 5 hours, at least about 10 hours, at least about 15 hours, at least about 20 hours, at least about 25 hours, at least about 30 hours, at least about 35 hours, at least about 40 hours, or at least about 45 hours. In some embodiments, the water can be substantially free of stirring motions for a time period of no more than about 48 hours, no more than about 45 hours, no more than about 40 hours, no more than about 35 hours, no more than about 30 hours, no more than about 25 hours, no more than about 20 hours, no more than about 15 hours, or no more than about 10 hours.

[0120] Combinations of the above-referenced ranges for the time period for being substantially free of stirring motions are also possible (e.g., at least about 5 hours to no more than about 48 hours, or at least about 10 hours to no more than about 40 hours), inclusive of all values and ranges therebetween.

[0121] In some embodiments, the water can be substantially free of stirring motions for a time period of about 5 hours, about 10 hours, about 15 hours, about 20 hours, about 25 hours, about 30 hours, about 35 hours, about 40 hours, about 45 hours, or about 48 hours.

[0122] In some embodiments, the method of preparing the fermented composition can include storing the composition for an incubation period, during which the composition can ferment. In some embodiments, the incubation period can be at least about 5 hours, at least about 10 hours, at least about 15 hours, at least about 20 hours, at least about 25 hours, at least about 30 hours, at least about 35 hours, at least about 40 hours, at least about 45 hours, at least about 50 hours, at least about 55 hours, at least about 60 hours, at least about 65 hours, or at least about 70 hours. In some embodiments, the incubation period can be no more than about 72 hours, no more than about 70 hours, no more than about 65 hours, no more than about 60 hours, no more than about 55 hours, no more than about 50 hours, no more than about 45 hours, no more than about 40 hours, no more than about 35 hours, no more than about 30 hours, no more than about 25 hours, no more than about 20 hours, no more than about 15 hours, no more than about 10 hours, or no more than about 10 hours.

[0123] Combinations of the above-referenced time ranges of the incubation period are also possible (e.g., at least about 5 hours to no more than about 72 hours, or at least about 10 hours to no more than about 65 hours), inclusive of all values and ranges therebetween.

[0124] In some embodiments, the incubation period can be about 5 hours, about 10 hours, about 15 hours, about 20 hours, about 24 hours, about 25 hours, about 30 hours, about 35 hours, about 40 hours, or about 45 hours, about 50 hours, about 55 hours, about 60 hours, about 65 hours, about 70 hours, or about 72 hours.

[0125] In some embodiments, the incubation period can be executed at a temperature of at least about 20° C., at least about 25° C., at least about 30° C., at least about 35° C., at least about 60° C., or at least about 45° C. In some embodiments, the incubation period can be executed at a temperature of no more than about 50° C., no more than about 45° C., no more than about 40° C., no more than about 35° C., no more than about 30° C., or no more than about 25° C.

[0126] Combinations of the above-referenced temperatures are also possible for the incubation period (e.g., at least about 20° C. to no more than about 50° C., or at least about 25° C. to no more than about 45° C.), inclusive of all values and ranges therebetween.

[0127] In some embodiments, the incubation period can be executed at a temperature of about 20° C., about 25° C., about 30° C., about 35° C., about 40° C., or about 45° C.

[0128] In some embodiments, the incubation period can be executed at a relative humidity of at least about 5%, at least about 10%, at least about 15%, at least about 20%, at least about 25%, at least about 30%, at least about 35%, at least about 40%, at least about 45%, at least about 50%, at least about 55%, at least about 60%, at least about 65%, at least about 70%, at least about 75%, at least about 80%, at least about 85%, or at least about 90%. In some embodiments, the incubation period can be executed at a relative humidity of no more than about 95%, no more than about 90%, no more than about 85%, no more than about 80%, no more than about 75%, no more than about 70%, no more than about 65%, no more than about 60%, no more than about 55%, no more than about 50%, no more than about 45%, no more than about 40%, no more than about 35%, no more than about 30%, no more than about 25%, no more than about 20%, no more than about 15%, or no more than about 10%.

[0129] Combinations of the above-referenced relative humidity are also possible for the incubation period (e.g., at least about 5% to no more than about 95%, or at least about 10% to no more than about 90%), inclusive of all values and ranges therebetween.

[0130] In some embodiments, the incubation period can be executed at a relative humidity of about 5%, about 10%, about 15%, about 20%, about 25%, about 30%, about 35%, about 40%, about 45%, about 50%, about 55%, about 60%, about 65%, about 70%, about 75%, about 80%, about 85%, about 90%, or about 95%.

[0131] Applications

[0132] The methods and compositions disclosed herein can be used for a wide range of aquatic treatments. For example, the methods and compositions disclosed herein can be used in the shrimp industry. One aspect of the disclosure relates to a method of inhibiting bacteria in water, the method comprising contacting water with the fermented composition described herein. In some embodiments, the bacteria can include gram-positive bacteria. In some embodiments, the bacteria can include green Vibrio. In some embodiments, the bacteria can include pathogenic bacteria. In some embodiments, the pathogenic bacteria can include Vibrio parahaemolyticus, Vibrio anguillarum, Vibrio harvyi, Vibrio vulnificus, Aliivibrio salmonicida, Photobacterium damselae, Aeromonas caviae, Aeromonas hydrophila, Aeromonas sobria, Aeromonas veronii, Aeromonas jandaei, Edwardsiella anguillarum, Edwardsiella ictahri, Edwardsiella piscicida, Edwardsiella tarda, Yersinia ruckeri, Francisella noatunensis, Mycobacterium fortuitum, Mycobacterium marinum, Nocardia asteroidws, Nocardia crassostreae, Nocardia seriolae, Streptococcus agalactiae, Streptococcus iniae, Lactococcus garvieae, Aerococcus viridans, Renibacterium salmoninarun, Enterobacterium catenabicterium, Clostridium botulinur, Piscirickettsia salmonis, Hepatobacter penaei, Francisella noatunensis, Chlamydia spp, or any combination thereof.

[0133] In some embodiments, inhibiting pathogenic bacteria can mean no change or substantially no change in the pathogenic bacteria's CFU after the water is contacted with the fermented composition. In other words, the CFU value measured after the introduction of the fermented composition can be the same or substantially the same as CFU value measured before the introduction of the fermented composition. In some embodiments, inhibiting pathogenic bacteria can include a reduction in the amount of recovered pathogens by at least about 90%, at least about 95%, at least about 96%, at least about 97%, least about 98%, at least about 99%, at least about 99.5%, least about 99.9%, or at least about 99.99%, at least about 99.991%, at least about 99.992%, at least about 99.993%, at least about 99.994%, at least about 99.995%, at least about 99.996%, at least about 99.997%, at least about 99.998%, at least about 99.999%, inclusive of all values and ranges therebetween, as compared to a control group not subject to treatment with the methods and fermented compositions described herein.

[0134] The methods and compositions disclosed herein can be used for aquaculture systems including, but not limited to, a pond, a pool, a lagoon, an estuary, a shrimp farm and an enclosed area in the ocean. In some embodiments, the method can increase survivability of aquatic animals by at least 5% as compared to a control where the aforementioned compositions and methods are not used. In some embodiments, the method can increase survivability of the aquatic animals by at least 6%, at least 7%, at least 8%, at least 90%, at least 10%, at least 20%, at least 30%, at least 40%, or at least 50% as compared to a control where aforementioned compositions and methods are not used. In some embodiments, the method can increase survivability of the aquatic animals by about 10% to 200% as compared to a control where the aforementioned compositions and methods are not used. Examples of the aquatic animals can include, but are not limited to finfish (e.g., tilapia or catfish) and other fish species. Further examples of the aquatic animals can include, but are not limited to shrimp and other crustaceans.

[0135] Although methods and materials similar or equivalent to those described herein can be used in the practice or testing of the present invention, illustrative methods and materials are now described. Other features, objects, and advantages of the invention will be apparent from the description and from the claims. In the specification and the appended claims, the singular forms also include the plural unless the context clearly dictates otherwise. Unless defined otherwise, all technical and scientific terms used herein have the same meaning as commonly understood by one of ordinary skill in the art to which this invention belongs. All patents and publications cited in this specification are incorporated herein by reference in their entireties.

### Definitions

[0136] The term “comprising” as used herein is synonymous with “including” or “containing” and is inclusive or open-ended and does not exclude additional, unrecited members, elements or method steps. By “consisting of” is meant including, and limited to, whatever follows the phrase “consisting of.” Thus, the phrase “consisting of” indicates that the listed elements are required or mandatory, and that no other elements may be present. By “consisting essentially of” is meant including any elements listed after the phrase and limited to other elements that do not interfere with or contribute to the activity or action specified in the disclosure for the listed elements. Thus, the phrase “consisting essentially of” indicates that the listed elements are required or mandatory, but that other elements are optional and may or may not be present depending upon whether or not they materially affect the activity or action of the listed elements.

[0137] The articles “a” and “an” are used in this disclosure to refer to one or more than one (i.e., to at least one) of the grammatical object of the article. By way of example, “an element” means one element or more than one element.

[0138] The phrase “and/or,” as used herein in the specification and in the claims, should be understood to mean “either or both” of the elements so conjoined, i.e., elements that are conjunctively present in some cases and disjunctively present in other cases. Multiple elements listed with “and/or” should be construed in the same fashion, i.e., “one or more” of the elements so conjoined. Other elements may optionally be present other than the elements specifically identified by the “and/or” clause, whether related or unrelated to those elements specifically identified. Thus, as a non-limiting example, a reference to “A and/or B”, when used in conjunction with open-ended language such as “comprising” may refer, in one embodiment, to A only (optionally including elements other than B); in another embodiment, to B only (optionally including elements other than A); in yet another embodiment, to both A and B (optionally including other elements); etc.

[0139] As used herein in the specification and in the claims, “or” should be understood to have the same meaning as “and/or” as defined above. For example, when separating items in a list, “or” or “and/or” shall be interpreted as being inclusive, i.e., the inclusion of at least one, but also including more than one, of a number or list of elements, and, optionally, additional unlisted items. Only terms clearly indicated to the contrary, such as “only one of” or “exactly one of,” or, when used in the claims, “consisting of,” will refer to the inclusion of exactly one element of a number or list of elements. In general, the term “or” as used herein shall only be interpreted as indicating exclusive alternatives (i.e. “one or the other but not both”) when preceded by terms of exclusivity, such as “either,” “one of,” “only one of,” or “exactly one of.” “Consisting essentially of,” when used in the claims, shall have its ordinary meaning as used in the field of patent law.

[0140] The term “about” means within +10/c of a given value or range.

[0141] The term “wt %” means weight percentage.

[0142] The term “room temperature” means a temperature of about 15° C., about 16° C., about 17° C., about 18° C., about 19° C., about 20° C., about 21° C., about 22° C., about 23° C., about 24° C., or about 25° C. In some embodiments, the room temperature is about 20° C.

[0143] The claims should not be read as limited to the described order or elements unless stated to that effect. It should be understood that various changes in form and detail may be made by one of ordinary skill in the art without departing from the spirit and scope of the appended claims. All embodiments that come within the spirit and scope of the following claims and equivalents thereto are claimed.

### EXAMPLES

[0144] The disclosure is further illustrated by the following examples, which are not to be construed as limiting this disclosure in scope or spirit to the specific procedures herein described. It is to be understood that the examples are provided to illustrate certain embodiments and that no limitation to the scope of the disclosure is intended thereby. It is to be further understood that resort may be had to various other embodiments, modifications, and equivalents thereof which may suggest themselves to those skilled in the art without departing from the spirit of the present disclosure and/or scope of the appended claims.

### Example 1. Fermentation of Soybeans

[0145] A composition was prepared as follows:
[0146] 3 L Water
[0147] 1 kg raw Soybeans
[0148] 50 g pasteurized molasses
[0149] 5 g of a mixed lactic-acid-producing bacteria and bacillus composition:
   [0150] 95.45% Dextrose Monohydrate
   [0151] 4% Diatomaceous Earth
   [0152] 0.4% of a 1:1:1 mix of Lactobacillus plantarum, Pediococcus acidilactici, and Pediococcus pentosaceus at a total bacterial titer ≥100 billion CFU/g
   [0153] 0.15% of a Bacillus subtilis 34KLB composition with a total bacterial titer ≥50 billion CFU/g
[0154] 2.5 g mineral mix
[0155] Enzyme (phytase at 1 mL)

[0156] The soybeans were ground and cooked in boiling water for approximately 15 minutes. Then the molasses was added and the mixture was allowed to cool to ambient temperature. Once cooled, the remaining ingredients were added with mixing, and the mixture was allowed to ferment for 24 hours at ambient conditions. After fermentation, the solids were collected and fed to vibrio infected shrimp on feeding trays or broadcast at approximately 5%-25% of the total feed ration. The supernatant from the ferment was collected and sprayed onto traditional feed pellets and fed as part of the overall feeding regimen. Within 7-days, ponds treated by this protocol showed reduced levels of vibrio and the shrimp show no signs of vibriosis compared to untreated ponds.

### Example 2: Soybean Meal Fermentation

[0157] In this set of experiments, fermentations were conducted at 600 ml, 750 ml, and 1,000 ml. Recipes were as follows:

TABLE 2
Recipes used for Composition

| | | |
|---|---|---|
| 600 ml | 750 ml | 1000 ml |

| | | | | | | |
|---|---|---|---|---|---|---|
| Soybean Meal | 167 | g | 167 | g | 167 | g |
| Molasses | 1.25 | g | 1.25 | g | 1.25 | g |
| Mineral Mixture | 0.003 | g | 0.003 | g | 0.003 | g |
| lactic-acid-producing | 0.013 | g | 0.013 | g | 0.013 | g |
| bacteria and bacillus | | | | | | |
| composition | | | | | | |

[0158] Water was brought to a rolling boil, then soybean meal and molasses were added. Mixture was “cooked (kept up temperature so that mixture bubbled)” for 20-25 minutes with constant stirring. Mixture was cooled to room temperature, then remaining ingredients were added with mixing. Stationary fermentations were done at ambient temperature for 24 hours. Sampling for plate counts was done every 12 hours.

[0159] The 600 ml ferment did not support very good growth of either the Bacillus or lactic-acid-producing bacteria.

[0160] The 750 ml ferment showed good growth of Bacillus and lactic-acid-producing bacteria. Activity at 24h after fermentation was 1×10⁷ CFU/g for Bacillus and 2×10⁶ cfu/g for lactic-acid-producing bacteria (FIG. 1 and FIG. 2).

[0161] The 1,000 ml ferment supported lactic-acid-producing bacteria growth very well. Bacillus also grew, but not as well as in the 750 ml ferment. There was water standing on the top of the soybean meal during fermentation. Activity after 24 h fermentation was 7×10⁷ CFU/g for the lactic-acid-producing bacteria and 4×10⁶ CFU/g for Bacillus.

### Example 3: Soybean Meal Fermentation

[0162] In this experiment, the intention was to determine how much “cooking” of the soybean meal and molasses was required to keep the background microbiota from growing so that the added lactic-acid-producing bacteria and Bacillus could dominate the fermentation. 600 ml and 750 ml compositions were used. Water was brought to a rolling boil, then soybean meal and molasses were added with constant stirring to prevent burning. Samples of the ferments were collected every 5 minutes from onset of adding the soybean meal and molasses until T=20 minutes. Each ferment was also observed cold to determine what the background microbial levels were for each.

[0163] Background contaminates brought in with the soybean meal and molasses were on the order of 6×10² CFU/g for all 3 cold ferments. Additionally, it was observed that 20 minutes of “cooking” the soybean meal and molasses reduce the background contaminates enough to encourage growth of the added lactic-acid-producing bacteria and bacillus organisms, as shown in FIG. 3. The amount of water can also an important factor in helping to reduce background contaminates. Less water does not allow for complete “cooking” of the materials. 750 ml of water seems to be the threshold for getting a good fermentation of soybean meal and molasses.

### Example 4: Incubation of Fermentation

[0164] This experiment was intended to mimic a warm, humid climate such as might be found in parts of Asia. 750 ml and 1000 ml fermentations were run in accordance with Example 2, then placed them in an incubator at 30-35° C., with some humidity (unknown) for 24 h. Fermentations were carried out as outlined above with cooking soybean meal and molasses, cooling, then adding in remaining ingredients. Samples were collected every 6 hours and plated—TSA for Bacillus and MRS for lactic-acid-producing bacteria.

[0165] Incubation at 30-35° C. increased total titer in the 750 ml ferment but not in the 1000 ml ferment. T=24 hour counts for both Bacillus and lactic-acid-producing bacteria were 3×10⁸ and 1×10⁹, respectively.

### Example 5: Inhibition of V. parahaemolyticus

[0166] Inhibitory properties of the lactic-acid-producing bacteria/Bacillus mixture fermentations against gram-positive bacteria were observed, particularly Vibrio parahaemolyticus, the causative agent of Early Mortality Syndrome in shrimp production. Vibrio parahaemolyticus (ATCC® 27519™) was isolated from diseased shrimp. Culture was re-constituted in Marine Broth (Difco 2216) and grown at 37° C. for 24-48 hours.

TABLE 3
Soybean Meal Fermentations

| | Control Composition | | Treatment Composition | |
|---|---|---|---|---|
| Water | 750 | ml | 750 | ml |
| Soybean Meal | 167 | g | 167 | g |
| Molasses | 1.25 | g | 1.25 | g |
| Lactic-acid-producing | 0 | g | 0.013 | g |
| bacteria/Bacillus | | | | |
| composition | | | | |
| Mineral Mixture | 0.003 | g | 0.003 | g |

[0167] The treatment composition in Table 3 is referred to herein as the “Treatment Composition.”

[0168] Water was brought to a rolling boil, soybean meal and molasses were added. Mixture was cooked for 20 minutes, then cooled. Once cooled, remaining ingredients were added. Control plates (no lactic-acid-producing bacteria/Bacillus mix) were done on both TSA and MRS to confirm cooking inhibited background microbiota prior to addition of the lactic-acid-producing bacteria and Bacillus organisms. The lactic-acid-producing bacteria/Bacillus composition from Example 1 was added to treatment fermentation, and T=0 samples were plated on TSA and MRS for confirmation of organisms. Fermentations were covered with plastic wrap and foil, then left on bench for 24 hours.

[0169] 40-gram samples of each ferment were collected in 50 ml conical tubes, spun down at 5,000 rpm for 15 minutes. Cured TSA plates, 12 each for control and treatment, were split down the middle, ½ for solids and the other ½ for supernatant. 10-ul of supernatant was place in center of ½ plate. Supernatant was then poured off to allow access to solids. Using a 1000-ul pipet tip, solids were mixed, then a small piece of solids was “smeared” onto the other % of plate in center. Plates were incubated at 35-37° C. overnight.

[0170] Soft agar tubes were prepared prior to the inhibition assay. Tubes were placed in a boiling water bath to soften agar. Once, molten, 3 tubes were then placed in a 55° C. bead bath to keep them molten. 200-ul of Vibrio parahaemolyticus broth culture was added to each tube and vortexed for 5 seconds. Tube was then poured around edge of TSA plate with solids/supernatant, allowing for spreading. Once agar solidified, plates were inverted and left on benchtop to grow, preventing swarming of Vibrio and Bacillus. Zones were then measured at 48 hours.

[0171] Three out of the 12 control plates showed some inhibition whereas all 12 plates of the treatment leg inhibited Vibrio parahaemolyticus.

[0172] Clearance zones were measured, and statistical analysis performed using a T-test for 2 samples assuming unequal variances. Data shows a statistical difference (p<0.05) between the control versus the treatment.

TABLE 4
Statistical Analysis

| | Mean Clearing | | |
|---|---|---|---|
| | Zone Diameter | Variance | P Value |
| Control | 0.18 cm | 0.15 cm | |
| Supernatant | | | |
| Control Solid | 0.31 cm | 0.56 cm | |
| Treatment | 1.55 cm | 0.94 cm | 0.0002 |
| Supernatant | | | |
| Treatment Solid | 1.67 cm | 0.72 cm | 1.5E−05 |

[0173] 750 ml fermentation continually showed growth of the lactic-acid-producing bacteria and Bacillus organisms of the invention. The lactic-acid-producing bacteria/Bacillus composition inhibits Vibrio parahaemolyticus in plate inhibition assays.

### Example 6: Inhibition of Vibrio hareyi

[0174] A culture of V. harveyi (ATCC® 33867™) was re-constituted in Marine Broth (Difco 2216) and grown at 37° C. for 24-48 hours. Conditions for soy fermentations and inhibition assays were the same as those described in Example 5.

TABLE 5
Statistical Analysis

| | Mean Clearing | | |
|---|---|---|---|
| | Zone Diameter | Variance | p Value |
| Control Supernatant | 0.29 cm | 0.93 | |
| Soy Ferment | 1.29 | 0.28 | 0.009 |
| Supernatant with the | | | |
| Treatment | | | |
| Composition | | | |
| Soy Ferment solids | 1.79 | 0.27 | 0.0004 |
| with the Treatment | | | |
| Composition | | | |
| Control Solid | 0.56 | 0.66 | |
| Soy Ferment solids | 1.79 | 0.27 | 0.0006 |
| with the Treatment | | | |
| Composition | | | |

### Example 7: Inhibition of Vibrio vulnificus

[0175] Cultures of V. vulnificus (ATCC® 33149™) were re-constituted in Marine Broth (Difco 2216) and grown at 37° C. for 24-48 hours. Conditions for soy fermentations and inhibition assays were the same as those described in Example 5.

TABLE 6
Statistical Analysis

| | Mean Clearing | | |
|---|---|---|---|
| | Zone Diameter | Variance | p Value |
| Control Supernatant | 0.19 cm | 0.42 | |
| Soy Ferment | 1.47 cm | 2.28 | 0.008 |
| Supernatant with the | | | |
| Treatment | | | |
| Composition | | | |
| Control Solid | 0.52 cm | 0.95 | |
| Soy Ferment solids | 1.47 cm | 2.28 | 0.06 |
| with Treatment | | | |
| Composition | | | |

### Example 8: Inhibition of Vibrio cholerae

[0176] Cultures of V. cholerae (ATCC® 582™) were re-constituted in Marine Broth (Difco 2216) and grown at 37° C. for 24-48 hours. Conditions for soy fermentations and inhibition assays were the same as those described in Example 5.

TABLE 7
Statistical Analysis

| | Mean Clearing | | |
|---|---|---|---|
| | Zone Diameter | Variance | p Value |
| Control Supernatant | 0.94 cm | 0.61 | |
| Soy Ferment | 2.59 cm | 2.21 | 0.003 |
| Supernatant with the | | | |
| Treatment | | | |
| Composition | | | |
| Soy Ferment solids | 4.92 cm | 5.14 | 0.00005 |
| with the Treatment | | | |
| Composition | | | |
| Control Solid | 2.97 cm | 9.20 | |
| Soy Ferment solids | 4.92 cm | 5.14 | 0.09 |
| with the Treatment | | | |
| Composition | | | |

### Example 9: Inhibition of Vibrio anguillarum

[0177] Cultures of V. anguillarum (ATCC® 19264™) were re-constituted in Tryptic Soy Broth (Difco 211825) and grown at 27° C. for 24-48 hours. Conditions for soy fermentations and inhibition assays were the same as those described in Example 5.

TABLE 8
Statistical Analysis

| | Mean Clearing | | |
|---|---|---|---|
| | Zone Diameter | Variance | p Value |
| Control Supernatant | 0.27 cm | 0.29 | |
| Soy Ferment | 1.32 cm | 0.13 | 0.00003 |
| Supernatant with the | | | |
| Treatment | | | |
| Composition | | | |
| Soy Ferment solids | 1.46 cm | 0.48 | 0.0002 |
| with the Treatment | | | |
| Composition | | | |
| Control Solid | 0 | 0 | |
| Soy Ferment | 1.32 cm | 0.13 | 2.8 × 10⁻⁷ |
| Supernatant with the | | | |
| Treatment | | | |
| Composition | | | |
| Soy Ferment solids | 1.46 cm | 0.48 | 0.00004 |
| with the Treatment | | | |
| Composition | | | |

[0178] Examples of inhibition of various bacterial species are shown in FIGS. 4-8B, as described below.

[0179] FIG. 4 shows inhibition of V. parahaemolyticus from both the supernatant (left hand side of each plate) and solid portion (right hand side of each plate) of soy meal fermented with the claimed microbial composition (left hand plate) versus a control treatment of soy meal fermented without the Treatment Composition (right hand plate).

[0180] FIG. 5 shows inhibition of V. harveyi from both the supernatant (left hand side of the plate) and solid portion (right hand side of the plate) of soy meal fermented with the Treatment Composition.

[0181] FIG. 6 shows inhibition of V. vulnificus from both the supernatant (left hand side of the plate) and solid portion (right hand side of the plate) of soy meal fermented with the Treatment Composition.

[0182] FIG. 7 shows inhibition of V. cholerae from both the supernatant (left hand side of the plate) and solid portion (right hand side of the plate) of soy meal fermented with the Treatment Composition.

[0183] FIGS. 8A and 8B show inhibition of V. anguillarum from both the supernatant (left hand side of each plate) and solid portion (right hand side of each plate) of soy meal fermented with the microbial composition described herein (FIG. 8A) versus a control treatment of soy meal fermented without the Treatment Composition (FIG. 8B).

### Example 10: Immersion Challenge with Acute Hepatopancreatic Necrosis Disease

[0184] Soy meal fermented with the claimed microbial composition was tested on juvenile shrimp, Penaeus vannamei challenged with Acute Hepatopancreatic Necrosis Disease (AHPND) as a result of infection with V. parahaemolyticus. The trial was conducted for 26 days which included a 1-day adaptation period, 14 days feeding treatment diets, a 1-day challenge with V. parahaemolyticus, followed by 10 days post challenge monitoring. The trial was designed with 3 groups, with 3 replicates each in a completely randomized design. Tanks were stocked with 25 shrimp/tank (250 pcs/m³ equivalent).

TABLE 9
Soybean Meal Fermentation

| | Treatment 1 | |
|---|---|---|
| Water | 750 | ml |
| Soybean Meal/Whole ground soybean | 167 | g |
| Molasses | 1.25 | g |
| Lactic-acid-producing bacteria/ | 0.013 | g |
| Bacillus composition | | |
| Mineral Mixture | 0.003 | g |

[0185] Water was brought to a rolling boil, soybean meal and molasses were added. Mixture was cooked for 20 minutes, then cooled. Once cooled, remaining ingredients were added, ferment was covered and left on bench for 24 hours at ambient temperatures. Ferment was then dried, ground and mixed with the basal diet at 20%/kg feed (w/w) and supplied in the post-challenge diet. Both Positive and Negative controls received the basal diet with no soybean ferment. Shrimp were fed ad libitum their respective diets 4 times per day during trial.

[0186] Lethal Dose 50 (LD₅₀) of 1.2×10⁵ CFU/mL and Lethal Dose 80 (LD₈₀) of 8.0×10⁵ CFU/mL Vibrio parahaemolyticus isolate VPLA-1 was used in the 1-day immersion challenge. Tryptic Soy Broth+2% sodium chloride (TSB+) was inoculated with the Vibrio isolate and incubated for 24 hours. Bacterial suspension was then added into tanks to achieve the bacterial density, measured by optical density absorbance (OD600 nm), expected to kill 50% and 80%% in the negative control within 10 days. Positive control tanks were treated with placebo (sterile TSB+).

[0187] LD₅₀ survival: Survival rates (%) for Soy Ferment treatment were 40.70±1.22; Negative Control 31.19±7.84, Positive Control 93.49±2.61 (FIG. 9).

[0188] LD₈₀ survival: Survival rates (%) for Soy Ferment treatment were 34.44±10.05; Negative Control 16.67±7.64, Positive Control 93.49±2.61 (FIG. 10).

### EQUIVALENTS

[0189] While the present invention has been described in conjunction with the specific embodiments set forth above, many alternatives, modifications and other variations thereof will be apparent to those of ordinary skill in the art. All such alternatives, modifications and variations are intended to fall within the spirit and scope of the present invention.

1. A composition comprising:
water;
soybean;
molasses;
a mineral mixture;
an enzyme; and
a microbial mixture comprising Lactobacillus plantarum, Pediococcus acidilactici, Pediococcus pentosaceus, and Bacillus subtilis 34KLB.

2. The composition of claim 1, wherein Lactobacillus plantarum, Pediococcus acidilactici, and Pediococcus pentosaceus are present at a ratio of about 1:1:1 by colony-forming unit (CFU).

3. The composition of claim 1 or 2, wherein Lactobacillus plantarum, Pediococcus acidilactici, and Pediococcus pentosaceus are present in the microbial mixture at equal to or greater than 1×10⁸ CFU per gram of the microbial mixture.

4. The composition of any one of claims 1-3, wherein Bacillus subtilis 34KLB is present in the microbial mixture at equal to or greater than 10⁶ CFU per gram of the microbial mixture.

5. The composition of any one of claims 1-4, wherein the microbial mixture further comprises a water-soluble diluent.

6. The composition of claim 5, wherein the water-soluble diluent is selected from dextrose monohydrate, anhydrous dextrose, sucrose, maltose, maltodextrin, sodium chloride, potassium chloride, calcium chloride, magnesium chloride, sodium sulfate, potassium sulfate, sodium bicarbonate, sodium carbonate, and magnesium sulfate.

7. The composition of claim 6, wherein the microbial mixture comprises about 95.45 wt % dextrose monohydrate, about 4 wt % diatomaceous earth, about 0.4 wt % Lactobacillus plantarum, Pediococcus acidilactici, and Pediococcus pentosaceus, and about 0.15 wt % Bacillus subtilis 34KLB.

8. The composition of any one of claims 1-7, wherein the mineral mixture comprises about 64.15 wt % dipotassium phosphate, about 20 wt % calcium propionate, about 4.5 wt % gemstone manganese, about 3.1 wt % gemstone iron, about 2.8 wt % gemstone copper, about 2.7 wt % gemstone zinc, about 2.67 wt % selenium yeast 3000, and about 0.08 wt % cobalt sulfate monohydrate.

9. The composition of any one of claims 1-8, wherein the enzyme is selected from phytase, protease, amylase, cellulase, cellobiohydrolase, endoglucanase, exoglucanase, and lipase.

10. The composition of any one of claims 1-9, wherein the soybean is raw soybean.

11. The composition of any one of claims 1-9, wherein the soybean is soybean meal.

12. The composition of claim 10, wherein the weight ratio of water, raw soybean, molasses, the mineral mixture, and the microbial mixture is about 3000:1000:50:2.5:5.

13. The composition of claim 11, wherein the weight ratio of water, soybean meal, molasses, the mineral mixture, and the microbial mixture is about 1000:167:1.25:0.003:0.013.

14. A composition comprising:
water;
soybean;
molasses;
a mineral mixture;
an enzyme; and
a microbial mixture comprising a Bacillus composition.

15. The composition of claim 14, wherein the Bacillus composition comprises Bacillus subtilis 34KLB.

16. The composition of claim 15, wherein the Bacillus composition further comprises Bacillus amyloliquefaciens.

17. A method of preparing a fermented composition of the composition of any one of claims 1-16, the method comprising:
boiling the water in a container;
adding the soybean and molasses to the boiling water;
stirring the soybean and molasses for at least 20 minutes;
cooling the soybean, molasses, and water to room temperature;
mixing the mineral mixture, the enzyme, and the microbial mixture into the water, wherein the water is substantially free of stirring motions for at least 20 hours.

18. The method of claim 17, wherein the soybean and molasses are stirred for less than or equal to 30 minutes.

19. The method of claim 17 or 18, wherein the cooling step comprises contacting the container with ice.

20. The method of any one of claims 17-19, wherein the water is substantially free of stirring motions for less than or equal to 48 hours.

21. A fermented composition produced by the method of any one of claims 17-20.

22. A method of inhibiting pathogenic bacteria in water, the method comprising contacting water with the fermented composition of claim 21.

23. The method of claim 22, wherein the pathogenic bacteria is selected from Vibrio parahaemolyticus, Vibrio anguillarum, Vibrio harveyi, Vibrio vulnificus, Aliivibrio salmonicida, Photobacterium damselae, Aeromonas caviae, Aeromonas hydrophila, Aeromonas sobria, Aeromonas veronii, Aeromonas jandaei, Edwardsiella anguillarum, Edwardsiella ictaluri, Edwardsiella piscicida, Edwardsiella tarda, Yersinia ruckeri, Francisella noatunensis, Mycobacterium fortuitum, Mycobacterium marinum, Nocardia asteroidws, Nocardia crassostreae, Nocardia senolae, Streptococcus agalactiae, Streptococcus iniae, Lactococcus garvieae, Aerococcus viridans, Renibacterium salmoninarum, Enterobacterium catenabicterium, Clostridium botulinum, Piscirickettsia salmonis, Hepatobacter penaei, Francisella noatunensis, and Chlamydia spp.

24. The method of claim 22 or 23, wherein the water is used in aquaculture.

The application's sequence listing, which the Patent Office published only in electronic form, follows.

SEQUENCE LISTING (18 sequences)

SEQ ID NO: 1 - DNA, 1560394 bp, Bacillus subtilis
ctgtatggcggaatgaacgctgaggacataagcggcgccgtatgtgcggctgactgcgaaggtccgattgaagaccgttatgacgcctgcgcggcggagctgtcagcgatcgtcacgcgtcttatcaaagaaaaacagaagaaaaaaacgctgatccagcttcttgtccccgacaggggggaagacaatgtattggcggggctggccgctttcctgaaaacggctcaccttgaacatccgaagctgtacggccaagtcatccaagccgatccggacgagtcagcctcggcgcttcttgccaagctgaaagaaaaccgggcgcatcctgaacaagcggaaatccgttatgaagccggcaaacgtctcgtcagaaactggcgtcatctgccggcgcctcaaagcggcgccattccgtggaaagacgaaggggtctacctcctcacagggggagcgggcggcatcggcctgattgtcgctgaagaaatagccttccgcgtcaaaaacgccgtcctcgtattaacggggagggcggaagcgcttgatgaagaccgctccgcccgcttacggcgcttggaagcgtcgggtgcccgcgtactgtatcaaccggtagacgtgacagacagggcggcggtcatcgccctcgtccgcggcatacaggaggagcacggaacactcgacgggatcattcacggcgcaggcgtgatcgctgacaactacattctgaaccagacagaaaacgaacggaagaccgtcatggcgccgaaggtgaaagggcttatcaatcttgatgaagcagcgaaagatgtgcggctggactttttcatyctgttttcttccttggcgggaggtatgggaaatccggggcaggccggttatgcggcagccaacgcatttatggatgtttatgcagcccgccggaaccgtctcgtgcgggacaacaagcggagcgggcagactctgtctgtcaactggccgctttgggaagaaggcggtatgcgcgtggacaaagagaccgaacggctgatgtatgaacagaccggaatgagagccatgcgatcggcgtcaggcatccaagcgctttacgccgcttttgcctccggagaacaccaggtaatggtggcagaaggcgacgaaaaacggatccgcagccatattttcgatctgggggaagaacaaagcgccgccggacaagctccggcagtgacagatgcaacagatctgaaagatcaggttcaagagaaactaaagcggcatgtatcagatcttttaaaggtaagcatgaaagatatcgaggctgacagcgaactgacggaatacggatttgattcgatcattttcactgaatttacaaatctattaaatcggtcttaccagcttgagctcagcccgactatcttctttgaatttccgacattgcgcaaactgagcggccatttgatatctgaatggaaagaagcattcagcggcttagaaagagagcgtttaaaaaccgctccaaaagccggagtaagaaaagctgaagctccggcggccgttcatgtcaagcgggaaacgcccgtatccgtaaaaggaaaatcagaagaaaaaaccgaaccgatagccattatcggaatcagcggtatttttccgcaggcgaaagacatagatgaattctggactcgtttatcaaaaggagagcattgcatcacagaaattccccgagatcgctgggattggcgcgaatattacggcgatccggcagcggatgcaaataaaacgtcaattaaatggggcggtttcatagatggaatcgccgggtttgacccgctgtttttcgggatatctccgaaagaagctgaaatgatggatcctcagcagcgtctattaatgatgtatgtgtggaaagccattgaagacgcggggtactcagcaaaacggattgccggaacaaaaaccggcattttcaccggtacactgggaagcggatatcaaactttaatcaataaggcgggtcttcctgtcgaggggtatacgatgaccggaatcgtgccgtccgtcgggccgaaccggatgagttattttcttgatatccacgggccgagcgagccggtagaaaccgcttgttcaagctctttagtcgccattcaccgcgcggtaaaagccattgaaacgggagattgtgatatgggggtcgcagggggcgtcaacacgatcgtcacgcctgaagggcatatcggttttcaaaaagcaggcatgctcagtgaagacgggcgctgcaaaacattttccgatcaggctgacggttatgtcagaggagagggtgccggcatgattgtcttgaaaaagctttcagaggctgagcgtgacagggatcacatctacggcctcatccgcggtacagcggaaaatcacggcggacgctcagcgtcacttaccgcgccgaatccgcaggctcagacggatgtgctgaaaagcgcttatcaaaaagccggtattcacccgtcaaccatcacttatatagaagcgcacggaaccggaacggcactcggagatccgattgagatcaatgcattgaaaaaagctttccaaacagacggggcgccgggcggatattgcgggataggctcagtgaagacaaatatcggacatttggagctcgcagcaggtattgcgggcgttatcaaagtattgatgcagctgaaacatcggacgctcgccaaaagtctgcattgcgagaacatcaatccccatatcaaattgaaggacagcccgttttacattgtgacagaaacaaaggagtgggaagcgctgcgtgatgaaaacggccgggtcctgccccgccgggcgggtgtaagctcattcggtttcggaggtgtcaatgcgcatatcgttattgaagaatacatgggcagaagtgagacggaacagcaggaagcccgtgagaaagcgtcatctctttttgttttgtcggctaaaaatgaagagcggctgaaagaaagagcgcgtctccttcgcgactttatcaaaaacggatcatcccgccatatcgatcttgcagatgccgcatacacactgcagaccggacgggatgcgatggaagcgaggctgggaatcattgcaggctccgcagaggaactgactgaaaaactgaacgcgtttttgatgggaaaaaacagcgaagatatcatcagcggccgtaaaaaacgcgagaataacacgatctccatgttctcagacgataaagacgctgctgacctcgtcagcgcctggcttgagaaaaagaaatacaggaaagtgctgcggctctgggcaaacggatttgacacggattgggagcagctgtatacggacaggaagccgcgccgcatcagcctgccctcctatccgttcagagccgaccgctattgggtgccgaaacgggagcagctgccgctttcgaatcaaaaaacagtattattgcaaaaaacatgggaaccgtgcgaggcagtgtcttcatccgagccgttcaacaacaaaatagcgctcatcgtctctgaagatacaaaagaccttgccgccgaggtgaaaaaacagctgaatgatgctgacattgtgcaggaaaatcagctcatctctttcttacagggtccgaacgcggccatctattccgggtttattgacttcaccggctgcggctcccgacaaaagcggcaggacatcagctgggtggcatcgctgcagcagctgattgaatacggccgcggacaagaaaacatgaaaatgctttaccttacaaaagggcttgaagccttcaaaaataaggctgccgttatgcatggtattgaaaaagcggggctttatcgcatgctgcggaatgaatacagccatattctcacttgtcacgccgatattgatcctgaagggccgctggagcagacagccgcttttattaaacaagaaattcaatcagacttaacggagtctgctgtttgctatagggacggcatgcgcttcagctatgttcttcggcagactgatcagattgaaccagaagccgtgcaaacagaccggactgcgtttccaaaagacgccgtcctggtgataaccggaggaacgcgcggactcggcgcgttatgcgccaagcatttcgtttccgcatacggtgtgaagaaactgcttctgacaggcagaaaggagctgccgccgaaaaccgagtgggatcttgagcaaacagaccctgtcgtttcggaaaaaatacagcttatccggcagctggaatcacaaggcgtaaaagtgtgcgtctcagcagttgatctgacggataagcaggccgtcggacggcttataaaagaggtaacctcaacgctcggacctgtcggaggcattctgcattgcgcgggaattgcggaccgtgaaaaccctgcttttctccgcaaatccaaagacagtattgcgcgggtgctcgccccgaaagcagacggccttcacagtctgtatgagagtgtaaaggatggtgcgccggcatttttcgtcctgttttcatctgtctcggcagccgtcccgattcttgcgacgggtcagagcgattatgcgatggctaattcttacatggactattttgcagaaaacaatgagagcggtatcattagcatacaatggccggcatgggatgatacgggcatgagcagggatacaaaaagcgggatgtatcagcaaacgggattgctgcggcactctgacgcggaaggtctcaagatgcttgattacattttaagagaaagacccggagctgtcgtgctgccggcacaagtgaaacatgattgggacatcaaagcgctggaaaacgccaagccagccgccaataaaggaatgaaagcagcttccaaaccccctgaaaccaaaaaacgggaacataaccggattgatattcaatcttggctgaggtcgcttttggcaaaagagctgagtatcgatgaaacgcatatggatatcgatgtgccttttcaggaatacggaatggattctatctttctggcgcaagtgctgacaaagatcgatcaaaaactgccgtccgtttcaattgatccgactgtccttctggaacaccctaccatagaacagctcgcggattatttagccgcacattgtccggaagctttttcggcagatgcaacagttcccgcggagaaggtccctttgcagaagacgctgaaacggagcaaaaaaacggcagataaccccgggaaacggggaaaggttgcgatcatcggcatggcctgccattttccaaaagcgggggatataagagaattttggaagaatctccgcagcggaacggatgccgtcactgaagttccgccggacagatggaacgccggggaacactatcagccgggtgaatatcaagaaggaaaaagcatcagtaaatggggcggttttattcacgatattgatcaatttgatccggagtatttcaatatttcagaaacgctggcaccgatgatagacccgctgcaaaggcagtggctcgaagtgagcgcggaagctttggccgatgccggttatcaaaaagaggatctctggggccgccgtatcggcgtttttgccggtgcaagggcaggtgcgtttcatcagaaatttcaatatttgcaaaaagacgcgattattggcgcggggcaaaattttattaccgcacacatggcgcacatttataactttacagggcccaacctggtcgtggatacggcctgctccagttcgcttacggcaattcatttggccgtgcaggccattcaaaatggagaagcggaagcggcctttgcgggcggggttgacattttgcttgatgaaaaaccttttctcacaatgagcgcggcgagaatcttatcgccaaatggccgttcaaaatctttcgatgccgatgcggacggaacaggaatcggagagggctgcggtgtgctgatgctgaagccgctcgaaaaagcgatagaagacgaagataaaatatacggcgttattgacggctctgcgataaataatgacggcagcacaatgggcgtgacgacgccgaatccccgggcgcagcaggacttgattgagcaggcggttcaatcagcggaaatcgatccggacaccatgacatacgtagagacgcacggaaccggtacattgatcggcgacccgattgaattaaagggattaaccaatgtcttgtctgcttattccgatgaaaaacaattttgcggtgtaggaagcgtcaaaagcaatatcggccacttgctgagtgcggcgggcgcggcgggaatcatcaaagttttgctggcgattgccaatgaagaactgccgccgactttgcattgccataaaccgaacccccgcttccaatttaaagattctccgctttatcctgtgcttgagctgaagcggtggaacggaaaaaaagagatactcagggccggggtcagcgcgttcggtttgggcgggaataacgcccatatcattgtcagcaacgaaggaattccgaaagagcgaaaagcggccatggaaccgaaaggcggccagacagtataccgaaaacaacggtattggcctgaaaaagcacagttgtccgaagcggaagaaaatgaggcgggcacagaagcaatgtttgaaataagcgaggtgtgatagattggcagttgccaccgatcaagtcaaaacgttcctgcagaaaatcagccatacgaattatatcgtccgggatcatcgcgttcatcaaatccgcgtcctcccgggcgtgactttaatagatatgctgtatcggctcgccgccgggtatctcggtgaacggcctatagaattaagacagattatttttaagcagcctgttgtaacatctgaagagtttgataaacacctgtatgtgacctttacgccggcgcgtgacagctggaaagttgagattactagcgaaaaagcaaaaaacggcacaccgcttggcggaaaccgggatgagaatatggaatgccagctttatttgcaagaagacacgccgcgggcaaaagaactgaatattgaagcgttcatgaaaaacgcaagccgaaaatgggacatgcatgacatttatggaattgcaagaagaagccatattgagcatggcgagtttatgaaaaatgaaggggccgtttatcagcttcaggataaagaagaattaatggagcttactctgagtgatttggctgaaggattccgggagaaatttaaggcgcatccggcttttttggatgcgtccacccttgccggctcttcctttgcattgtcggcccaaaagcagaatgacacaccttatattccttttatgatcaatcgtttttgcatgtatcagccgtttccgaaaacgatttacacttattctgcgaaaaacagccgcactgaaagcggcgtatcagatagcgaacctgatgtttattcggccgacttcacgatttacgacagggcagggaacgtattggccgaatgtgagaaactgacagtaaaaagggtcagacaagcgaatatgattacccatctgatagacaaagagaagccgcctcagcagaacagaagcggccgtggtgagtcggaaaattctgtggccgcagaagacgtgtctgaacagcaaacgccggaacaaaacatggtgacttacataaagtcggaaatcgccaggctggtcaatcgtccggcacaggatattgatgtgaggaaaggcttttatgatatggggcttgactcggcgcatttgctgaagcttgtaaagatattagagcagacttttcagcagcagttttatccgacactgctttttgaatattcatctgtccgccgccttgcggattaccttatcaatgaagcgggctgtgtgctgaaagattcggcaaaagaacggcatacatcagacgctgacactgctgatgaggttctgttttttgaacccgcctggaaagatcatccgctggaaacggcggtgcagaactggcaaaaacacacccgtcatctcattatcgctgccgatgcaggaccccgtctcacaggtgaactcggcacatattgcccggaagcggaagtgatagaactgaaaagggagcatgaggctgcagatgagcagtttggagcagatgccgagcgcatatttcgtatgctcaaacgggaactgacagaccatccgaaagaacatacattgattcagcttgtatgcgccgttgagaatggagcggcattgtcatccgctctcggggctatgctgaaaacggcacatctggaaaatccagctcttcgcattcaggtcatcaccttctgtgaaaagaatgagagattgccaagtgagacggccgcaatcattagaacagaagcagactgctctcatgcaggatgtacagacattcggtataaagacaatatgcggcagatcagattgttcgaacgtattgagaaactggacgggcagacacagtctccttggaaacaaaacggcgtatatgtcattacaggaggcctcggcggtcttggatttctgcttgcccgtcaccttgcagaaaaagaaaaagtgaagctcgcactcatcggccgttcgccggaacagtctgagaagatcagcagactgaaagcattgggcgcagaagttctttacgttcaagcggacatcggcaataaagccgaaacagagcgggcatttgctcagattacagaaaccttcggccggctgacgggcatttttcattgcgccggtgttttaaaagatcaatttatcatccaaaaagacagttctgacttgaagggggtgttcctgcctaaaatcagcggcctgattcatgcggacgaagcttcacggaatgaaccgcttgaatttttcgccgtattttcctcattctcggcgttggccggaaatgccggccagacagattatgccgcagcgaacgcttttatggatgaatatatgaaatatcgcgatcgcaaagcggaaaaaggcgaacggaccggggcttctatgacgatcaactggccgctttgggaagatggcggcatgcaggttgacagcttgatgaaagagatcatgaatgctgcaacgggcaccagcccgcttccggccggggaagggatggcttcacttgaatatatgctgcgtctcggcaagctgcaatccgttattttatacgggaaggagcccgctgtaactgaaagcatggcccgattggttccgatggcagacaagaaccgctcttcattatcccatgcagctgtcaagagaaggagccgaaaacaagagagacatacagaagagcatgatattgcggtaatcggattggcgggaagatacccgcaggcgggaagcatcgaagaattttaccaaaatctgcgctctgggaaagactgcatcacaacaatgccgaaagacagatggaaaggttatcccttctcatatgaagcagatcagttctaccgttacggaggatttttagatcgtatagacagctttgatccgctgtttttcaatctgactcctcgccaggctgaaatgatggacccgcaggcgcggctgtttttagagacggcttgggaagcttgtgaagatgccggtttttatcaggacagaacggcgcgcgggccatcttcgcaaaagagaaaacgcgtcggggtattcgcaggtgtgttttggagccattatgagctgttcggggctgaaatcacacagcggggcacaccgctgtctatgggcgtgacgcctgcctctgttccgaatatcgtgtctcactgcctgaactttacgggaccgtcaatggctgttgatacgatgtgctcttcttcgctcacatccatacatttggcatgtgaaagcattaaaaggggggagtgcgaattcgcccttgccggcggtgtgaatgcggtcacacacccgcataagtatgcgtttttggcgaatgccggatttctgtcttcagaaggcgtctgcaaaagcttcgccgacggcggtgacggttatgtgccgggagaaggcgtcggcgcggtgttactgacaaccgttcaagaagcgcaaagaatgggctgtccgatatatggcgtcataaaaggctccgctttaaaccatgtcggaaaaacatccggtttgaccgtgcctgatccggcatcacaggcggaagtcattacagattcttttcggggtgccggcattgatccggagacactgagctatattgaagcccacggaacaggcacgtctctgggtgatccgattgaaattgaagggctgagccgcgctttccgcaaatggacaaacaagaagcggttttgcgccatcggctctgccaaatcaaatatcggccatttagaaggagcagccgggatcgccggattaacaaaggtgcttttgcagctgaagcatggagaaatctttccgtcattgcacgcggacacgctgaatccccatattccgtttccggacacgccgttttatgtggcggaccggctggaagaatgggaacggccgtcacattctgaccagccgagaagagcgggtttaagttcttttggcgccagcgggagcaatgcccattttgtcatagaagaatatctgccgccgcaggctgaaaagaaatcggtgaatatacgggaagacgagccggttctgtttctgctttcggcaaaaaatgaagaacgcctattagaatatgtcaaacggtatgaccgctttttacgggaaaaagaagtcaaccttaaagacctggcctacacgcttcaagctggcagagaagcgatgcctgaacggctggcatttatcgttacatccgtttgcggcctgcaagcgaagctgaaggatgtgcttgaacggaaaacagaaattgaaggatgtttccgcggacgtgctcaagatgatatttcatcaagtggaatggccgagctgctgaaaaacaagcaatattccagattgctcactgagtgggcaaaaggagccgccgttgactggagcctgttatacgaaggagagaagccgaaacgggtcagccttcctgtatatccgttcgcgaaggagcggtattgggtacctgtgcctgcggatatccggaaacagacagacgaaccggcggaaaaccaaaagatcattcttcaaaaagactggaagcagcaagatccggcggaatctgaagcattatcaggaacagtaatgatacttgcaactgataagacgagccgattggctgatgctctttttaaaggaaacggccatattgaaacgatctgcttcatccatcaggcaaaagacggcgccgattattatgccgccgcatcggggcgaaacctttacggcagagtgcgggagtctcttcaaaacaaacagatactcggggtcgtcgacataaccgcatatgacgcggaatatgaacggcaggaagagatagaacacggaaagcttgcctttttacagcaggctctggaatcactccgtcatagcggcgctgtgttcagccaagtgacacaccgcctccagcctttcaaggaaagtaaacctctgatgcaaggggcgaaaacggcggggctgtaccggatgctgggcgctgagtatgccaacattcattcttttacgatagatagcgattgtgagattgagcatacagaagaattaagcagacagattgagattgaatttttacagccgcgggccaaaagcgtcagtgaatgctgctacaggctgaatcgccgttatgtgccgtttctgaagcagggtatgaatgtttcggcggcgcctgagctttcctattcgtctgatgatgtgctgttaataacgggcggatcgcgcgggatcggcgcaattgcggcggagcatgccgtttcacgcggctgcaggaaactggtcatcatggggcgggagccgcttcccgattcctcagagtgggcagacatgaaaaaggacggcattctcccggaaaaagccgagcggatgcagaggttagccgagcggggcgcggagatccgttattacagcgtttctcttacggatcaaaagggactccggaacatgacggacggcatccgcggcacgatggggccgattaccggcgtttttcattgcgcgggtgcaatgggagaacaccccgctttttataacaaaaccgaaactgaaatcaaaagcgtttgcacaccgaaagtaacagggcttcgcggtctctatgaagccgttcagaatgagccgctgtcgttttttattttgttctcatccgtttcgggcctgatcccttcgcttgctgcggggcaaagtgactacgcgatggctaattcatttatggactcttttgcaaatcatcaagcaggtaaaggaaacgtgtttgttaaagccgttcaatggcccgtctggaaagaaatcggcatggctgaaggcctgccggaaacacctgcttatcaaaaatcaggactttccaggctgtctgctgaagacggactgaagtttttagattacatcatcttaaacggacaaagctgcggaattccttgtgttcccgaagacagtgagcctgattttggtgatcttctgaaggtgaagaaagctgaagctcccgtgaaaaaaagcactgccggtgaccaaaaggtgaaggacatgattcgtcaatgggtgcgcaccgttttcagcgaagaactgaaaatgacggatgagcagataaaagatgatatgccgtttgatgaatacgggattgactcaatactctttgcggaattggttcaatcattgcaaaaacggatcagcataaagttaacaccgtccttaatgcttcaatatcaaacgattacagaaatggttgactatttcgcagcgcatcatgaagccgattttgtgacaaaagaaaatggtttcgttcaagacggggacgtagagcctgatttagccgccgccgctgaagagagaacatccatgaagccgaaagcggatactgaagacgatattgccgtcgtcggcatatcctgccgttttccgggggcgggcggaacggatgctttttgggagctgctgatgaaagggaacaccgccattcggcctgtccccgcatcgcgctggcatgcaacagcaaatacaaaggattatgcggggtggattgatgatatcgacatgtttgatgcgggctttttcggcatctctgaaaaagacgcggcaattatggacccgcaggcgcggatcatattagaagaagcggttcattctgtttatgatgccgggtacggccaaaaggatttatcgggccggaaagtcggcgtgtacatcggcggcagggcgcagccttcagccggtatggaacatatcctgcaggcgcctaacccgattttgggggcgggacaaaactatttggcggccaacatttcacgatttttgaatgtcacagggccgagccttgtcgtggatacagcatgttcctcagggctgatcgggctgtcctttgcaaaagacgcccttttggccggaaggattgacgcggccttagtcggttcggtgagtctgctcttatctccgtccgcgcaccggttattcggagcgcgccatattttaaatgagaacggcgtgtttcatatattcgaccgtgaatcagcgggagaagtgctcggagaaggagcgggggcggtttttatcaaacgattgagcgatgcggtacgggacggagaccgtatttacggcgtcataaaagccgtctcggtaaacaatgacggccggacgctcggtcccggttcaccgaatataagagcgcagagagacgccattcaaactgcgcttgacatggcggaaaagtcgcccgaagacattggatatatagaagtgaacggaggcggttccccaatcgttgattcggtggaaatcaaggcgctctcagatgtctatcagctgaaccggaaaatgcttctgccctgccggatcggatcggtgaaaccgaatgtggggcatttgcttctgtcttcaggtcttgcgggcttcatccgatgtgtgctgagcgtctatcataagcggattccgcctttcttatcagcgcgtgagccatttgaacattatgactttgaagcgtcgcgtattcattttaatcgtgaacccgttgattggcattcagagaagaaacctcgcgtcgcagctcagagttcatttcctgacggcgggacaaatgctcatatcctcgttgaagaatacagaggtgaaaggcagcgggaacatcacctggcgcctcagccgccggaattcagaaaaaaacactacccgcttttgggcggctggaacagcacggagaatgaagcggaaaaaacaagtaatgaaaaaacagacattgcggatattttaaagaaatatgagaaaaaagcagagacaagcactgcacctgcagactcgttttggcaggtgacaacgtgacgtttttaaaaggggacgaaccatgaaaaaaacagtgaatctgcgcctgacggcagaacatcccattatgaaaaaccatcttgttcacggagaatctgtcatgcccggtctggcctatattgatatgctgtatcagctggcaaagcaaagccttgatctttcattccgttccatctgtctgaaacgggtgaccatttatcatcctttatcagtgaaacggtcagagcggcttgatgtgagtgtcatattcagtaaagaaaaggagttctggactgcctcgatttgcggggcggattccgggacggttttcttatcagcggaggtgcatgaaggggttttctcatcagataagcgccttgacgcggaagagaaaaaacaagttgcgcttccatcagtctccttgcatacggtttacgaagacgcgagaagccgcggactgtcgcatgacgggctgatgaagccggagggagagatctatgcaaatgaagaggaatgtttccttgatattcggcagtctgattcatgccaggaaaatctccccggcgctctctttcatcccgcgctgatggacggtgccgccatggcctccggcgtattgcagacagctgcaggcgccggtttgtttttaccgatttattatgattcgtttagtgccgctgaaaccgttacggagcgctgttacgcggtgatttcgaaaaaatccggcacgccttctgaaatggtgaaaatggatattgacttttacaaccccagcggtgcgcatattgcttcactgctcggcctgacagccaaaaaggtgcggacagaccggcagctgatatcaggcgttcagcagatggatgaaaccttataccgcattttttcaacatacgtaggccgtcctgtcacaagaaatgatgcgcacactgtgttttttgaattaggtcttgaatcgtcacagcttctggccattattaaagatatagaaggggcgtttgatctgcggctgaatccgactcttttatttgagtgcagcagcatatccgaactgcttgaagacataaaaacaaaaggaacagaagaatcttccggccttgtcgcggatgcagcaccggtctctgaaacgcaatcagtcagtcagacatttactttctatgaacatgaagcattccttcaggatcatctggttttcggcaaaccggcactgatgggtgtagtgtatccgtgtctggtgcttgaagcatccggagcgtctcattccggcacgtatcccgccgagctgaaagatatccgctttacgggcgggcccgtcacgctggagccgggagaggccgcacatattgacatttcatttgcaacagaaaagagtgccgaacgctttaccgcaagctgcactgtctccggtaaagaaagccggaagacgtgtgccgaaggagaaataagcagatatacagaggcacccgtaaaaaaatcgtatgacgttgaacaaatgaaggcgcatgcacaaaaggtagcgccggatgttatttcccgtctgtacgattcggttgccgacttcacgataggcccgatgctgaaaacggtaacggcgggatacaaaatgagtgagagctcctttttattgcagctggacttatcaggaaaaaaagaaaaaggcgatctgcgtcactttgcatttgacccgcttatattgaattcttgttatatgtcgctcggtgaagaagagttgcagctgaaaaagcggattcacgtcccgctcatgattgagaggctgacgctttacggaccagtcatgtctgataccgtctatgtggtgaatacaatcaaacataaaaaagacgggtttctctcatttgatgccgcagtcctcagtcataccggggaacagctggcggaattgaaaaacgcgtctgtgaaagaagtgcttcagccaaatcggcttgaaaatgcgtcttttgccccgtccgggaatcaaagccgtcaaaaaacgaaaggaaaaccgctggatattgccattgtcgggatttccggcaagtatccgcaggccgatgatatcaatgcgttttgggaaaatctcaaactaggaaaggattgtattaccgaaattccgaaagaccgctggaattgggaacattacttttccgaggaccggacggcgccgggagcgatctacagcaaatggggcggattcattgacgggatcgccgattttgatcctgagttctttaagatttccccccgtgaagcggaacaccttgatcctcaggaacgactgtttttaatgcatgcgtggatggccatggaggatgcgggatatacgaggacatcacctgaacttggccgtcaggtaggtgtgtatgccggtgtcatgtatcaggaatacccgctattcgcggctgaagcgggagtgaaaggacggcatatcgggctccccggcggtatttcatccattgctaaccgtgtctcctatttttgtgattttcaagggccgagcatttcgatcgatacgatgtgttcgggttcgctgacttcattgtacatggcgtgccgggatctgcgggatcatcggattcgcgcggcgcttgccggcggagtgaatctcaccgttcatcctaacaagtacttcatgctgagccaggggcagttcatctcatctaaaggacactgcgggagtttcggcgccgggggtgacggctatattccggcagaaggggtcggggtgctgcttcttaaacgtttagaagacgccgtacaagacggagatcggatttacggcgtcattaaaggagctgccattaatcacggcggaagagcgagcggttacaccgtaccgaaccccaaggcgcaaagcgaagtcatttctcaagctttacaggaggcgggggtatctccgggccagatcagctatgtggaagcgcacggaacagggacgaaattaggcgatccgattgaaatccgggctttaaccgatgcattcggtgatgttcctgaaacatgtctcatcgggtctgtcaaatcaaatatcggacatggggaatcggcagcgggcatcgccgctgtcacaaaagtgctgctgcagatgaagcacaaacaaatcgccccatctttgcatgcggatgttttaaatccgaatatccaatttgacgaagggccgttttccgtctgccgggaattaacagattggaaacggattgcagcagacggagaagaacagccgctcagggcgggggtcagcagctttggggcgggcggttctaacgcgcatatcattattgaagaatatgaggctcctgtcaaacaagcaatcagcagccaagagccggctgtcattctgctgtctgcgaaaaatggggagcgtctgacagaatatgcggagcgccttcttgcttttcttcaaaagaagcatacggataagccggacttatttgatgtcgcgtacactttacaagcggggcgggaagcgatggatgagcggctggctttcattgcggactcccttaaggagctggaggacaagctcagatcgtacttggaaaatgaaaacgcaccgcatctttacagggggcgggcgaagcgaaatcatgagacagtggctgtgtttgaatctgatgaagatttgcaggaagccatggttaaatggctgaaaaagagaaagtacggtcatttgctgaacatgtgggtgcagggagtcgatgtggactggaacttgttatattcgggacaaaaaccccggagaatcagccttcccgcctatccgtttgcaaaggtcagatgctggattcaagatgaagccgaggcggtttcaaaaagggatgacggcaaaacggtgatccatccgctgcttcatgaaaatacatccgatctgtgggagctgaaattcacatccgtttttaccggacgggaattctttttcactgaccacacagtcaatggacagaaggtgctcccgggagccgccgtgatcgaaatggccagggcggccgttgagcgtgccgcatacgctgtgccggacggacgtaaaggaatgtatttgaaagatctcatatggatgaggcctgtcgttcataaggggacggatgtagaagtccatatcagccttatccttaagggaaatgaagacattgaatttacgatttacagcctatcggaagaacccgggggagaacggattatatacagtaaaggcaccgcggtatcaggagagatagcagcggttccgtcagttcacttagagggctggctgtccggctgcagccaatcggttatgacgtctgatgaggtttatcaggctttccggcatgcgggtatgatatacgggccgagccatcaaggaattgatcagctgatgatcggagagaggggtgctgcagcccggctgtcgctgccggaatcggcagacagtaccgccgatcagtttgtcatccatccgagtcttttagatgccgcgtttcaggcgtcactgggtgccggttcagatactgtcggagacactccgatgctgccgttttccctgcggcaggcagaaatatttcagccgactcagaaaacgatgtgggcgcttgtccgcaaacagagcgatcggtcagataacggagcgctgacgctggatattgatttatgtgatgaaaacggcgctgtttgcatgagattaacaggattttcctgccgggcggtccggcagacagaccaaaccgaaagcaaacggcaggaagttcagacggcgatgcttgcccctatttgggataaaactttcttttctctggaagaaaatcgagcggttgatcaagaacaattgctgatcatcggaaagccgggaaataccataaaggctgcggcaaaaatgtggccccgcgcccatctggcggagacgccggatcattcaagcgagcaaacattacgtgaattgacagccggatatcaggatatccgccatttcttatggattgcgccggatcgtttcgcacccgcatccgtcagtcaggaaatgcttgatgagcaggagaatggggtgattcaatgtttccgtttcatcaaagcgctgctgtcaatcgggtatggaaaccgaaacatcagctttacggcggtgacccggcagacacagtccgtgtatccgggtgatctgccgcagcctgagcatgcaggcgtacacggtttgatcggttcattggcaaaagaatatccgaactgggacatcaggctgattgatgcagaagaaggcagtgattcgtctgaaatgaaagacatctggcgcctccctccagatccggacggaaatgctgccgcgtaccgtaacggagcttggcacaagcaaaaaacagtccgggtgctgacaagttccgctccgcgtatgtcgtacagagaaggcggcgtttatgctgtcatcggcggagcgggcggcatcggagaagcatggagcaaatacatgatcacccgttataaggcacggatgatatggatcggcaggcggccgaaggatcaggagattcagagcaaaatagacaggctggcgctatcaggccccgcgccgcattatatacaggctgatgctcaagatgccgtagcgcttaaagcggccgtccgttccgtaagagagcaatacggcaatataacgggagtcatccattccgcgataacgcttgccgacaaaagtatggcgaatatggatgaagcttctttcagaaacgcttattcagctaaggtgaatacgagcgtccgaatgatcgaagcttttaaggaagaaccgcttgattttgtgctgtttttctcatccgttaattctttcacaaaaaatgccgggcaaagcaactatgcggcagggtgtacatttcaagacgcctttgcccgccatatcgcttccttgcttgattgtgaagtgaaagtcatgaattggggatattggggcagtctgggtgttgtatcagacccgtcttacagaaaacggatggaggcgtcagggatcggttctattgaacccgatgaagcaatggaggcgctggaagtcttactatcagaaccgttcagccaagcggcattcatcaaagctgctccgcacggcttagccgagctgacggatcaagatgcaatatcggttgtatccggcccgaagccttcatttatggaaagcgtcaagcggcaaaatccggatcggaatgaacggcttgagactttaaaacgagaaatggagttgcgcatatgaacagccttctttgcaaactgctcttttaccaattacagtcaatcggttttttcagcgagcctgtcactacacctgcagcatccatgcggagcgccggcgtgatcggcacatacggcagatggctggaagaaagcctgaatctattaaaagaaaacggatatatcgcgtatgacggatacacggtcactcttctcacggatcagcgcccggacggccgcacagtctggaatgagtggaatacccataaacgcctgcttcccaatggggagcttgcgcaagctgaattggccgaggcgacgataaaagcgatgccttccattttaaaaggagaacgtccggctacggatatcgtatttcccgattcatcaatgcggctcgttgaaggtgtttataagcataatcctgtcgcggattattttaatgaagtgttagcagattccgcggccgcttacctgaaagcctatcttacagaacaccccgatgcccgtatcaggctgatagaagtaggggccgggacgggcggaacgagcgccatgctgtttacaaaactgaaaccatttgcaaaacagattgcggaatattgttatacggacgtttctaaagcttttttaatgcatgccgaacaggaatacggagctgatgtgccgtatttgacaacagccttgtttaatgcggaggagccttgcgaatcacaaaatatcaaaacgggtgtttacgatattgtcatcgccgccaatgtgcttcacgccacaaaaaatatcggtttgacactgcgccgtctgaaagcgctcctgaaatacaacgggatggttttgataaacgaaatcagcgatcgttctgtttttacccatttaaccttcgggctgcttgagggctggtggtcctatgaggatgctgagcttcggattccgggaagtcccggcttatatccaaaatcgtgggagcgtgtgctgcattcggaaggatacagagcggtttgtttccctgctgaaacggctcatgatttaggccagcagattatcgcagctgagagtgacggactcgttcggatgcaagggatcagagacggcagaaagccatacgccgccccggccgaagttttccgaaagcccgcgcagcctgtttcccgcagccgcgcgccagaggagcatcaagctgttaaggctgatggggaatcggtctcttcccatgtccgctctgtcatcaaaacaagtattgccgatgtattaaaaatgaaagaagaggatattcaggaagaactgaatttctctgaatacggcattgattccattctggccgtcaatgtgattaacgagattaataagcgattgaatcttacactgcagacaacgattttatttgattactatcatgtgaaactgctgaccggttatatctcggaagaatacgaaaccatcatagcctcgtctctgaagaccgatagagcgaaaatccgcccggcgcttcaggaagaacggcctgctgaaaaacctctgcagacggaaagaaaggaaaacggttatcagaaaccgaaacaagaacgtatgccgccttctttcgcaaagtccgatgactcgggaatgttccgggttgtgattgaccgtccgggcggcattgaagatctgacgattgcccgcagtgaagtgcccgagacaaaagatgacgaggttcaaatagccgtccgcgccttttctttaaacttcggagacttgctttgtatcagagggctgtacccgacgatgccgccttatccgttcactccgggatttgaagcaagcggcgtcgtgatcaagacagggaggcatgtaacatccgtcattccaggtgatgaagtgattgtcggcatgggagaggaatttggatctcaggcgaatctcatcacatgtaaagaacatcaagtctatcataaaccggcccggctgacctttgaagaagcatgcgctcttcccaccgtggcggtgaccatgatagacgccttccggaaagccggacttaaaaaaggcgaaaaaatattaattcagaccgcgacgggaggaacggggctgatcgcggtgcaaatggcccggcatatcggcgcggaaatatatgccacggccggatcacagaaaaaaattgagtatttgcattcgctcggggtccgcaataccatctgctatttagaagaagattttgaaacggaaatcatgcgaatgaccggcggccgtggggtggatgttgtcattaataccctggccggtgatgccttgcaaaaaggaatgaattgcctggcgccgggcggaagatatatcgaaattgccatgactgcgctgaaatccgctaaatcagtcgacttgtccgtccttcataacaatcaatcgtttcacagcgtggatttgcggaagctgtcccttcaaaatccggaccaggtcaaggactatcaattggaactgcagcggctggcggaagagggagtcattcagcctgtcatctcaaaaatcttttcctttgaagacataaaagaagcgtatcactgtctggatgaccgcggaaatatcgggaaaatcgtcatcagcgtttctgaaccgtatcaaatgacgtaccgccccgaacaaaaggatccggccgatacagtaaaatcagcagctgtgttacctgaaaaagaaccgatcgcgattatcgggatgagcgggcggtttgctgaatcggagaatctccatgagttttgggaacacttagccgccggacgggatctgattaaaaaagcagacagatgggatatctctgacagccaatgccagtatggcagttttatagaggacattgaatgttttgaccccgttttctttcatatatcgggacgtgaagcgacctatatggaccctcagcagcgggtgtttttggaagaatcatggaaagcgcttgaagatgcgggatatgcgggagactcggtaagaggccgggaatgcggcgtgtatgccggctcctgcggcggagattaccaggccatttttaaacagcaggggcccgcgcaggctttttggggcaatcacaattccgtcactccggcaaggatcgcctatcaccttaatttacaagggccggcgatcactgttgatacagcatgttccagttcactgacagccattcatttggcatgtcaggggctctggacgaaagaaacggaaatggcggtggcgggcggggttttcattcaatccactcccgctttttatcagtcgtcaaataaggcgaatatgctgtcaccgaccggacgctgccatacgtttgatcaaagcgcggacgggttcgtgccgggtgaaggcgtgggagcggtggtgctgaaacgtcttagcgacgccgttagtgacggagatcatgtgtacggcgtcataaaaggatctgcaatgaatcaggacggcgctacaaacggaatcaccgctccaagcgcgctttctcaagaacgattggaacgtcatgtctatgatacttttcacattgatccggaaaccattcaaatggtggaagctcacggaacgggcactgcactgggcgacccgatcgaattcggcgccttaacgcgcgctttccgccgctatacggataaaaaaggatattgcgccatcggctctgtgaaaaccaatctcggacatgccgctgcggccgcggggatggccggactgtttaaaatcctgctgtcgctgaagcatcggcagattccggcttccctgcattttcaccaagccaatcagcatattcaatttgcggacagcccgttttttgtgaatgaaaagctgataccgtgggaacggaatccggatacaccgcgcagagccgccatcagttcattcggattcagcggaacaaatgcccatcttgtgattgaagaggcgccgcaaaccgtgcgccggtcgccggcaaaaccggcctgcctcattcctttatctgcgcggacggagcgtcagctggaaattcaggcagaacgcctgctggattcactcagcaagaacaaagacagcgatctgggaaatataagttatacgctcctgctcggcagaaagcatttacatcaccggtttgcctgtatcgtaagcagtgcggacgaactgaagcgggtattatcggagtggcttgtaaaaagagagcttccgggtgtgtttgtgtccaatttgaaggatcagaagccggcagaagaagccggaatgaaaacattcggaatggaatgcattgaacagtgccgctcggcagcttcgcccgcgcagtacagagaaagcctggcacatatcgctgaccttttttgcagagggtatgatcttccttttacacggctttttgacggagggcaatattataaaacgccgcttcctgcctacccgtttttaaaagaaaggtattgggcggctgatgtaaacagttctttaccaggccaatccatgaaaaagtctgaaacgcaaaccgttctcccgtcttcgccgcagcctgaccatgaagggctgatttctctgagtcctttaactgagatcgaaatgagagcgtttgaaccggagacattgcaaaaaccgatcgtgttacagcctttggattgtactgtttctgtccagcagccgaaaaaagccgtttccgaagacaatagaacattgcttgaagagttgaggataagcctggcagatattttatttttgtcaccggaagatattgatgctgatgagcctttcatcgatatggggcttgactccattatcggggttgaatggatacaaacagtaaataaaacgtaccacactgagattactgccaataaggtgtatgaacacccgacgcttgaagagcttgcggaatatatagcggggcaaataaagaaatccgagtatgctgaagcggaggaaacagcggtacgtccgcaaatcccggaagcagaaactccccttgccggcatctctgacggcactttgcgcaaagagcttaaagaaagccttgcggacatcctgtttctgaagccggaagatattgatgagcatgaggcattcattgacatggggctggattctattatcggtgtggaatgggttcagtctattaataaaacgtatcaagcgtctattacggcaaatctggtctatgaatatccgacaatcgcaacattagccgggtatctgaccggttccgttcaaaaagacactgaggaagtacatgaggaacatacgaaacaaaacgatatatcagaagagacagatgatcaagaaccgcccgaactgatctgtcttaacccggggggaaagggaagaccgattttctggtttcattccgcgctgggggcagtggagctgtaccagcctgttgccgaacggaccgggcgtcctttttacggaattcaggcaagaggatggatgacagaccgggaaccgatccgcggcattaaaaacatggcggaatattacgttaagctcatacgtaccgtgcagccccggggtccttacgatgtaggcggctattcattagggggcatgctcgcttatgaagtcacccggcaattgcagctggctggagaaaccgttgagtcaatcgtcatgctcgactcctttgactcggcgggtgcgcgggaaataaacattcctgatgaattatttgataaaaatatgatgctgcagacggtgaacatggctttatttgcaccgatctatcaacatccggaacgcatttctgaaaccttgattcaccgtgatgaactagatgccgatcttcatgaagacatatttttagagcaattaatcgcaaaagccaaacagcgggggttaacgaagacggacgcgttggtgaaaaatctgatcaggcagaatataaacgttcaggacgcttacgaaatcactgattacgaactcctgccgcttccggatccgaacggggtgacatgctattatttccgaaataaaaacggtattttcttgggtgagcttgatccgttttttacgatcagggccgatattttatccgctgatttcgtcaactactggagccagtgggaagagcatatgacaaacatcgccatcatggatgtggcggtatccaaccatatgacgttattggctgaagacagcgcagccgaaacgatttctgaattttgcggcgttttatattcggcagacggaatgacagaacacagcttcctgcagctgcaggaaaagatactgaatgtgcatggtgagatgctgaagcagcccgccaaaacaagaccgtaaattcacatatccgcccgccgggtttactcgtaagctttggcgggtcatttcaaatcttgatcacatcttggaggaatgaaaatgaccagtttaacaaaaatcagacagcagcagccgtacaagtggtaccaaacgatgagagaaacctctcccgttcattacaatgaaaaggaagattgctgggaaatcttcacctatgatgaagtgaagcgggtgatttctgactacagtcatttttcttccgatcataaatacttaagtgcggacaagcaggaaaaaatgatccggcatattaacaaagacagccttttgaaaatggacccgcccgaacacaccgtcttcagaaaattggtcaatcagccgttcatgccgaaatcggttgagtctcttgcaccgcgtatagccgctatcgctgatgacctgcttcaggccgtccgttcaaaaggcaggatggacattattgaagattacgcatttccgcttccgattatcgtgatcgcagagcttttaggattccctccgaaagacagagatatctttaaaagctgggtcgaccaaagccagaatgtaaaagatgaaaagaaaatgaatgaagtgcaaaagcagatgatcggatatttcatgcagtttattttacagcggagaaaacagccgcaaaatgatttaatcagccatttaatttcagctgatttagacggagagccgctgtcagacaagcaattaatcggtttttgcggcttgttgatcgtcgcggggcacgtaacgacggaaaatgtgatcggaaattcatttctcagtctcaaggagttcccgcacattctgccccggctgcttgaaaacaaggcgctccttcctgactttattgaggaagtcatccgcctcagaccttccattcagcgggtaacccgctacactgcggttgagagcgagattggcggaaaaacgattccggccggagaaaaagtgtatgcgtggattggatcagcgaacagagatgaaaagaagtttgaaaatgccgatcagattgacttgggacgaaagccgaatcagcatctgtcattcggtcagggcagccattattgtttaggagcgccgctggcccggcttgaagcgaaaatcgcgctttcccacttttttgaacagatgtccgcatggcgttttactgaggatcaagagccgaatctggttccgagccctgtatttcacggcgttgacaggctgcttgttgagttttgaacggaaaaataaaagaggcttccacaggaagcctctttactctgggggcttggagaaatgaatgtaggaatcgaagcaatgaacgtgtttggcggaaccgcgtatgtagacgtcatggagcttgcggaacatcggaacttggataaaaaaaggtttgagaacctgctgatgaaagaaaaagtggtggcgcttccgtttgaagatccgattacgttcgccgtaaatgccgcaaaaccgattatcgactctctgtcagaagaggaacggaatcagattgaaatggtcatcacctgtacggaatccgggattgattttggcaaatccatcagtacatatgtccatgattatttgcagctgaagcggaattgccggttatttgaggtgaaacaggcttgctattctttaacggccgggtttcaaatgggcgtgaatttcatcttatcgcaaacatcgccgggagcgaaagcgctcatcatcggaacggatatttcccgctttttagtggctgaaggcggtgacgcgttgacggaggaatggtcctatgccgaaccgagtgcgggggcgggagctgtggcgcttttagtcagcagcacccctcatgtctttttgcttgatcaaggcgcaagcgggtattacgggtatgaagtcatggatacgtgccgcccgattccggatagtgaagcgggggatgctgatctgtcgctcatgtcttatttggactgctgtgaaaaatcatttcaggaataccgaaagcgtgtgagcggggcggattataagaatacatttcaatacctttcttttcatactccgtttggcggaatggtaaaaggagcgcatcggacgatgatgagaaaattggcaaaggctaagccgcaagacattgaggcggattttcagcaacgcgtgctgcctgggattcaatactgtcagcgcgtcggcaacatcatgggggccaccgtatttttatctcttgccagcacgattgataacggctcttttgatacgccgaaacgagtcggctgtttttcatacggttcgggctgctgctctgaattttacagcggtgtcgttatgccgcaaagccgtacacggcagaatcaatttcagatcagccggcatttggatgaacgcgtccgtttatcgatggctgattatgaccggctgctccaagacagcggcatcgtaaaattcggcacaagaaatgccgcgcccgcagcagacatcccgaatgcgcatcaaggaaaaacgcgattggtgctgactgaaataaaagagtttcacagaaagtatgaatggacgacttaatatcagaaacactcagagccggaaaggcttgagtatttttaaagaaacggagaataaacatgaatccaatgattgatgtacaggaaacagaaccgggcattgtgcaggtcacaatgcaggatacggcagggaaaaacgggctgtcagaagagtttgtcagagagctgcaccgggtattccaagacatcaatgcccatccgtcctataaaaccgtccttctgacgggttacggaaattatttctgcaccggaggaacgcaggaggggcttttgaccattcagagcggaaagcttcaatttacagatttaaagcttcatagtcttttattggattgcaggattcccgtgatttctgccatgcaggggcatgcgatcggagccggctttacaatcggtctgagctcggatttcgtgattttaagcagagagagtttttattcttgtaattatatgaagtacggatttacaccgggaatgggcgcgacgtatattgtgcctgaaaaactgggaattgtcctcggggaagaaatgctgtttacggccgcgaatttcagcggcgccgctctggaaaaacggggagttccgtttgaagtgctgccgaaaaaagacgtccttcaaagaggccgcgaattggcccggctgctggcggataaaccgagagcctcactggttgcgctgaaaaccaatgtgaccgcacggatcaaaagagagctgacaaaagcggttgaggaagaggtgaacatgcacgaagccacattccatcttcctgaagtaaaagagagaatcagccgcttatacggcagttaaacagaatgaaaaaagcatgggaagccccatgctttatcactggtccgtcttttgcagaacggagcctgcgaattgttctttaatttcggcgctccgggctgcggtttctgcgatgcagtgcatgatggcttcttcaaagcggcgctcttctaatgcgcgaaggcctgcttcagtcgtgccgcccgggcttgtgatttccttgcgcaggcgttcaggccgtttgctgcttgttctgagcatttccgtcgccccggccatggtttgtaaaatcagctcttttgccgtttcttccggcaggccggcttgaagggcggccttttccattgcttcgacataccggtacacataggcgggaccgcttccggcaatggctgtgacggcgtcaaggtgtttttcttcaaagcgcgtcgcttctccgattgtttccagaagctcttttgccgtccggatttcagcttcactcgcctcggagcttgcggaaaaaccggtcgccgattgctgaatggccgcggatgtattcggcatcgcccggatgatggtgagctttctgccgaaatattgctgaatcgtgtgaatcgtcagccctgcgatgacagaaatcacaagctgatctttcacgtattcgcgaatgttctcaatgctttctgccgcatctttcggtttaaaggcgagaacgagaatgtcggtattgctgaaaaactcttctttatcccggcacggttttactccgtacgttttttggagctcttcaagccggctgtcatttgaccggtttgtcatatatatatgtccgggggctgtcattccgctttgcagcagtccgttcaccattgcttccgccattgatccggccccgataaaaccgattttcttcatataaatcctccttcttctcaaaacacaaaaaaaccttcccgtcaaaaaggacgaaaaggtttcgcggtaccaccttacattagcacgaatcagccgtgctcagctcaaatcccgtaacgaggggatacgtttaggttttcctaaccgctctgagggcaggttctgtaaacaagagggccgcaatgtctttcagccggggacattgctctctgctgccgttgtttatatactagttcctcgtcatcgcgttccgtgttttctagtttgttgttcattatgctatgcgcaagagcgggatgtcaatctttttttccgatatgcggcaataatgacacagtgaaaagaaaacgctaaaatatgattattcaggaatgaaaagaacgaaggagcgtaaacatggcagcgagaaagatcattccgatacgtgtgccgactccgtttgcagtcggcgacgttatcgtttatttagtaaaagatgaagccttaacccttattgattgcggcccgaatacaaaggaagcggctgaatcgctctcattgcagcttaaggaacacggggtttctgcggcggatatagaacaggtggtgctcactcatcatcacgcagatcattcaggtctgctgcaccttttttccgacgatgcggaagtaatagggcatccgctgaatgacaggtacattactcaggatcagtcgtatatcgcccggcaggaggacttttttctgtcgcttatgactgaaatggacgttcccctgacgcctgaagacatacataaaacagttaagctgtcatacttattttctgcaaaccgtccgttaacgaaaacagtgagggaaggcggaaaaattgacgggcttaacggctggacggtgctcgaaatcccgggtcatgccgcttctcacattgcgctctaccatgaaaaaagcggtgaaatgttcagcggcgatctgcttttgtccaacagctccaccaatccgattctggaagctccggaaaaggggggcgtgcgcgcggccccgatgctcgactacttgaactcaatgaagcggctgtatgacgtaaacccgtcctttttatatccgggacacggcgatctgctgacagacgtaaagcctgcttttgacaggcggcttgaaaaacagagaaaccggtcggaatatgtgctgcgcctgttgtcagaggaaacgctgacggctttccaggtatgccggcggctgtttccggctgtgtatgaaaatgaattgtttttaacgatgtcagaaacgatcggccatcttgacgtgctggccgccgaagggaaggctgtatcctttcagtcggggaacactctgaagtttaaagctgtgaaggggtgaaggaaatgggcagattaacggataagcggatttggatcaccggagcatccggcggactcggagaacggcttgcatattcctgcgcggcagaaggggctcatgtttttttatccgccaggcgggaggaccgcttgcaggaagtgaaaaagacgattaccgcgcgcggcggacagtgtgatgtcgttccgtttgacgtccggcatgcagaagaggctgaaaacgtaaggcgtttgatcggtcatgttgacgtattaatcaacaacgccggcttcggcatttttgaaacggccgctgattcatctttggatgatatgaaggcaatgtttgaagtcaacgtcttcggattaatcgcctgtacgaaggcctgtcttcctgtgatgcttcatgcgaaaagcggccatattatcaatatcgcctcacaggccggcaaattggcgacgccgaaatcaagcctttattccgcaacgaagcacgccgtgttagggtattccaatgcgttgcggcttgagctggacggtacgggtgtagctgtgacaacggttaatcccggtccgatcaaaacagacttctttacaattgcagataaagagggcggttatgtgaaaagcgtcggcagatggatgcttgatgccgaccatgtggcagagcgtattacatccgtgattctgacggataaacgggaaatgaatcttccgcgatggatgagcctcgggacgaagctgtatcagcttttcccatcgtttacagaaaaactggccggccgcgcattaaagaaaaagtaacaagggggaaaaaggaatgtccgaccgggatatacacaaggcattgatggcagagcctctagtcaggcaaatggcggaggcgcgtgaagtattttggatcaatccgcataaaaccgatgatccggtaaagcatggcgctgaatggaaaaaggagattgccgaagcggaagaaaggctgcgccggtttgcgccttatatcgcgtcggcttttccggagacggaagcggagggaggcctcattgaatctccgcttgtcttgattaatgaaatgaagaagcatctggaacacagcgccgctcaggctttccccgggcgtctgcttttgaaatgcgacgacgaacttccgatttccggttccattaaagcgcgcggcgggatttacgaagtgctgaagcatgccgaagatctcgcggtaaaagcgggaatgctctcagcagacgacgattacagcatattgactgaagaacggtttaccgcttttttctcaaaatactctatagccgtcggctctacgggcaatttaggtctgagtatcggcataatcggcgcgaagctcggcttttgtgtgaccgttcatatgtccagtgacgcaaagcagtggaaaaaggagctgctccgggaaaagggggttcgcgtcatcgaatatgaagcagactacagtctggctgtcaaagaggggcgcatgcaggcgaagcaggacccttattgttattttattgatgatgagcattcccgggatctgtttttggggtatgccgttgcgggaagccgtgtgaaaaagcagctcgaccaaatgaacataaagcctgatgcagatgaaccgcttttcgtttatttgccgtgcggggtcggaggaggcccgggcggcgtcgcgcttgcgctaaagctgatctatggcgagcatgtccatatttttttcggtgagccgacgcattcaccgtgtatgctgttaggactgttttccggcttgcatgacggaatcagcgtgcaggatatcggtcttgataatcaaacggccgccgacggactcgcggtgggaaggccgtccggactagccggccctctgatggagcctataatcagcggctgttataccgccgatgacggcacgcttttttcgctgctttatcaattaagggcggccgagaataagagccttgaaccctctgcactcgccggactggccggagccgtcaaggtcgttcagaccgaagccggaaaccgttatataaaagagcgggggcttgagatggaaaatgccgtgcaccttgtgtggagcaccggcggaagcatggttccggaggaggaaatggaagagtacagccggatcggttcctcatttttgaaaaaaatgggcagacagtgaagcggttttccgttacaatctttgtaagcgtttgtttttttatcggaaagccatacagagagattggtgtgaattgtgaaaagtaaagaattgaacttacatacattgtatacgcagcacagccgcgagtcgtgggccggattcggcggccatctttccattgccgtttcagaggaagaagccaaggccgtagaggggctgaatgactacctgtcggtggacgaagtagaaacgatttacattccgcttgtgcgcctgctccatcttcatgtcacgtctgccgcaagacggaatcagcatgtcaatgtgtttctgaagcatccgcattcagcgaaaatcccgtttatcatcggaatcgcgggcagtgtcgccgtcggcaaaagcacgacggcgagaattttgcaaaagcttctttcccgtctgccggacaggccgaaggtgagcctggtgacaaccgacggtttcttgtatccgacggcggaattaaaaaggaaaaaccttctgtccagaaagggattcccggaaagctacgacgtgaaagcgctgcttgagtttctgaacgatataaagtcggggaaagagagagtggaggcgcccgtatattcccatcttacgtatgacagggaagagggcgccgtcgaggttgtcgaaggtgcggatatcgttattatcgaaggaatcaatgtcctgcagtcgccgaccttagaggacgacagggaagatccgcggatttttgtatcggatttctttgatttttcgatctatgtggatgccgaagaaagccggattttcacgtggtatttggagcgtttccgcctcttaagagaaaccgcttttcaggatccggcttcttattttcataaatttaaggatttgtctgatgcagaagcggataccatggccgcctccatttgggagagcgtcaaccgtccgaatctgtatgaaaatattctgccgacaaaattcagatcggatttgattttgagaaaaggtgacggccataaagttgaagaggtgctggtaaggcgggtgtgatgtgaggaggaagcgaatattatgatacaccatattgagttgtatgtatctgacttgaaagcctccgcccggttttggggatggtttttaggtgagctcggttatagggaatttcaaaattgggactccggcatcagctggaaaaacgcaggattttatgttgtgcttgtacagacagaggagcgttttttaacaccggagtaccatagatgccgggtcgggctgaaccatctggcttttcatgctgcatcaagagagcaggttgacgagatgacagaaaagctgcttgccagaggatgccccgtgctttacagggaccgccatccatatgcaggcggaagcacgcattacgccgtatacacggaggacccggatcggataaaagtggagctcgttgctcctgcttctgaatgaactataacttttcgtttttttcttcgcgcagcgcgtcgagtttcttttcgattctgtccaattgtatgcggcgcttgttcaagcttctgaatacgtatatcacggcaaacaggaaaaatgcggctgcagtaaatgaaatcaattgaaaaatgacatcaccgatgttcatcttttttacctccgtgtgcggcgggcttcttcagcccgccgttttttcattttgaccgatatgaagacatgggggatgaatcatttctctcctagctttgtttttttctgagaatgaatagtttctgcatgtggcttatgaccacttttgcggccgcatatcccggaatggccagaagcatcccggcaattcctgagaatttgccggcggcaagcagaagaaaaataatggtcagcgggtgaatgtccagcttccgtcccataatttgcggggaaatcagctggctttcaagctgctggacaatgacgacgaccgtaatcaccagcaccgcctcggtcggtgaatcgaacaatccgacaatgactccgggaaatgtgccgatccaaggcccgataaacggaatcaggtttgtcaccatggcgaacgcgcccagaacgagcggataatcgagcccgattataaaatagccgatcgtgacgagaacgccgacacagaaactgacgagcagctgtccttgtatgtatgaactgagagcttcatccatatcccgaaggatttgttttccttctttttgatgtttttccggaagaagccgcagcagtcgccgaggggctttgtttccttcttttaacatgtaatacagcgcaaacggaataatggcggcggtgatggcggcattggcagccgtaccggccaggctgctgagagaatcagcgattgaaccggaataatttgcggctttgtccgctaattttttaaaggaatccccatgctgaagccgggaaaaccatttgctgtcctggagatgcccgatccaattttcagcttttgcggaaagctccggaatatgatctgtgaaggctgtaaactgtttttgaacggcagggcccgccgtataaaggaagaggacaaaaaggccggctgttcccgcataaatcgctaaaatcgcgattccttcgggcagctttaatttcgtatgcagcactctgacgagcgggcggcacaaatagtaaaggacgcccgataatacaatgggcggaaacaaggttttaaccgtaatcacaacaggctggaacaaaaagtctattaatgttccgagataaatgatgagaaataacagaagaacggcatagccgatcctgaaataaggcccgacaggcatatcctgcaccacgcaatctttaagggtttactctcggacatttcccttatcgcccggtgcataaacgtccgtgtcaggaaaactgcccttgattggtgacgtaatcgtagataatatcttctacatgggcatggagatcctcatcgggttcttcattccttctttcttctaaagctttttttaaactctgtttttcataggggctcagcggatctgtcgacacattccgtccatactggcggagggcttgtcccagcattttttctataaattgatccatcatatattctcctattcttgtcattcatctttattctactaaatatcatgtgatcctcccactcttctatcatattttctgtcaggacgatttaggcttttattccagttcagccgagagaatacgatgaaacggcagcgttaacgcatcttcatcgtttatgatttttaaacgcttttcgtcatgcatcacttgttttacccagccccaaaagcggcgggggccgtgtgcggaagcgtaggtgaccgaaatggccctgtcttcttcaatcgacgccgcaatgatgcggttcatgtcgttcagttgctcttcgctcagttccggaggccggaattcccgttcttttcgttttttcgcaagcagctgctcccgatgttcgggcagcatcatccggcttgattcccacatgacattatacccgggtgttaatttgttcggattcatgtatatcacctcaaattatttgtaatgcccgccgattttttcagcccggtgaaaggcttggccggcctctgtcagtgaagcggcatggaggagcgacgcagggccgtaccgctcatgaatatcatccaatactttgccgagactgatctttttttcctgggcatcgaacaggctcagctgaacataatcacaaggctccagctgggaaagggagacgccggcgctgcggacgggcgcaccgttccaatgctctttgaagagcttgaccgccgttttaaaaatatccattccgaaattagtcggtgacaccagctttctctgtctgtgaaaacctgaagggaattcaaaatcagcgcctctgatgctgaccgaaaccgtatggccgatgtattgtttgaaacgggcgcggcgggccacttcttcgcttaactccagcagcacgactttgatatcctcaaagcggctgtagtctctcgggagggtcatgttatggccgatcgctttttgccggctgtgcgtgttgacggtgaccggagagggatcgatgccgcgggctgtccgctgaagcaattcgccgttaatgccccagcgttttttcagcaattcggcggggtgtccggcaagcccgccgattgtgctgatgcccatccgtcttaaatgatgctccattcgttttccgatgccgaataattttccgaccggcagcggccacagatcctgcctgatatttgacatatccaatctgtggatgccggatgcgttttttttggcaaaatggtcgcaagccattttcgcgagcgccttattcggcccgatgccgacacgggcataaatgccgaattcacgcataatcgcttgctgaatgcttttggcaattgtaaaaggatcaccgaacagccgcctgcttccggtcacgtcgagaaactgctcatcgatggagtagggttctacaagatcggtataccgttcaaacagttcggtaatcatgacggatacatcaatataccgctgcatccgcggacggacaataacggcatcgggacatttggcctgcgcttcccacagccgttcggcattttttacgccgtatcgtttggcgagcggacaagccgcaagcacgacgccgctgcgtctttcgggatctcccgagacaatcacgggccggcttttgagatgaggcgcttccgctttttccacagacgcataaaacgattgcatatctacaagaagaatatcagccataaaaaaacctccgggaacgtttgttctgtttttcattgtacccgaacaatgaccacgtttatactggtaaatcattccccggctggaagacgtgctgatttgtttgcttgaaaagaaatcatttacaattgcaaacaacccacatataattttttatattccaatgagaagagctgacattcattttgccggacgaaaaggagagtcaatcgataatggatattcgaacaattacctctgaagactatgaaatggttacgtctgttttgaatgaatggtggggcggcaggcagatgaaagacaaactgccgcgcttgttttttgaacattttcaggacacaagctttatcacgtacgggccggagggaatgaccggttttttaatcggttttcagtcgcaatcagaccctgagacagcctacattcatttttccggtgtgcatccggatttcagaaaaatgcaaattggaaaacagctctacgaccgatttatggagacggtgaagaaaaggggctgcacaaaagtcaattgcgtgacggcgcctgtcaataaagtatcaatcgcttatcatacaaaattaggctttgaagctgaaaaaggaaccaaaaccgtaaacggaatccctgtttttgcgaattatgacggtccgggagaagaccggattctgtttgtgaaatatatgtagagggggatgaatatgggttttttagctgacacgcccaaaccgccctattatgcggtcattttttcatcaataaagggaaaatatgatgaggaatatgaacatacggcagagcgcatgatgaatttggcaggcggacagccgggctttttaggcgcggaaagcgttcgggaggaaaacggctgcggcatcacggtttcctactgggacagcctggaagcgattaaaaggtggaaagaccatacggaccaccaggcggcaaaacaaaaaggaaaaaccgcctggtatgaagcgtacgcggtccgcattacgaagacggagtcacagcggatgtttgcgtcaaaaggggcggaagattgattacatttttacagcatacacaagaacagaccgcgcgggaaattgcggcggttcagcgctgctcttatcaaaaagaagcagagctgatcggctttttcggcatccccgccttgcatgaaacacccgatgatatacagcggtcacgggagacgtttgccggtttcaaggaaaaagatcagcttgcaggcgtcatttcgtatgaaaaaaagggatatgaccttgtcatatgcaggctgacggtgcacccgtccggctttcgaaaaggaatcggacgggcgcttattcaatttgtgatagacgagaaccgggacgcccaaaaaatagaggcggctaccgccagccaaaacgttccggcagtctctctctatttaaaaacaggtttcacagaagccggacagatagagacgccggaagggctggccctctcgttttttcatctttatccgaagaggaaagcggaagttgttccgtacaagccggaatggaaagaaatgtttgaaagagagaaggcggacttgatccgaatcttcggcccagcacttcattctgtcagacacatcggcagcacctctatcccggggatggccgccaaacccgtcattgatatactggcggaggttaaagatatttcggacgctgaccgattcagtccgcagctggaagcactcggctatgaggcgaaaggggaaaacgggctagagggccggcgtttctttcaaaaaggcggcagcaagcgcacacaccacgttcacatatacgaaacaggccatccggacgtgaagcgtcatctgctgttccgggatttcctcaccgcaaagcctgaaaaagcggctcaatacatggaactgaaacggcacctcgctaagacgtacccatacgatatggaaaaatatagtgaagggaaaaatgactggatcaaggcggctgaacaagaggcaaaggtctgggagagcgggctgctgtaaagaaagcagaaacaatgcatacagcggctcggtatgctacaatggcgaaaatgaaaaacggaggatcatctatgcaaatacatgtgacggatgcggcgaaacacacacttcagcaggcaatggacgccaacccggggaaaaaagcgcagctccgctatgacgcagaaggctgcgggtgcgcggtgagcggcgtgccgaccatctggctggcggacgaattaacgggacaatgcgaagccattgaaaccaacggacttccgctttacatccagacctcacaaaaagtgttttttgacgaggaaatgacaatcgattacaatgaaaaggcaaaaacgctcgtcttaaaaagcccggcagagatgctgagcccgagaatgagcatattagtaaagcagggagaaacggaaagtgaatcaaaagctgaaagccattaaacagacggcacagcataaaacgtgggtatcctttctgaacaacaaccacccgtacagtctgctgcactggtccatcggaggcgctgaatccgttcagaaggatgtctggctgcttcaggatgagatgaccttcaaagcgcaggagtttacgacaatcgacctcgccattgactggatcggagaaaatatggacgggattaccgacgttttatgacgtgaaagcgaaagaaccagcatacgttctttcgcttttttacgtttgcgtcatggtatctaaaaaggtttgaacggctttacggtagctctccggatttttggtgtacgacatggcatgcccgcccgattcggccagatagagcatcttagggccgcgttttttgcggtgcagcaattcggaacaagcgggaggtatataatcatcttccttactgtgaataaacagcacgggctgccggattcggctgataaccgatagaggcgatacatcacggatacggtatccttctctcatccgcaaaaagaaatcagccaaaggcagaagcggccacggaggcagccggaactcccgcttcaccctgtaggcgagctgatcgcgaaagcttgcgaacggacagtccgcaatataaaaatcagcgccgttttcatcctgatgcccgcccgcgtataataaggccgtcaccgctcccatcgattccccgtggatgccgatttgaccgccgtctccggttttgtgtctcacccaattcacggcttcttccaaatcatctttttcaaaatagccgtagctcgtcgttctgccgccgctttttccgtgcccgcggtggtcatatacgagcacattccatcctaaatctaaaaataaatccatgtatttcaatgaattgaacgaatttacggtaacgccgtgacaaataatcatggtgtttgccgtatgatgcggggcgacgtaaaagcctttgatctcatacccgtggcgtgacaggatgacagcctcttctttttccatggcctgaaaggaatcaaatctatcatgcccgtccgccgtttcttttttcatgatatcttcatccgtctttttcttcataaacataatcagattcgtaaaagcgaatccggcagccaaaaagactgcgcaagccgaaccgaacaccgccagccgttttttcacacaggcaccctcctttcatatgaaaaatccttcctccggcttttcaggaccgtgaacgttgccggcctccggcgctccgtggtacacttgcttcaccatattcagatacggggggcgtaatgatgaaaaagcagctgcctaaagaaaaacacagcttaaaagacgatctggaggaagatctgaaggccaggcttttgcaaatgaaaagtgagctgaaggaagaagacgagaaaaaacaggcgcagcaaaaggcggaacaaatcagaaaacgaaaagaaaaagaaaaacataaaagctttgaagagctgctgaatgaaagcagtctcgattggcacaaatataaataaaccggcatctgaaaaggtgccggttttatgatttaagaacgatgggcttcgtatacgtcccgttttgtatggtattgcagggctttgatttcctggctgcttaaacgccgggcctctgcagccgaacagttttctctcagctgctcaagtgagctggctccggtgatgacagaagcgacggcctgctgtgacagtaagtattgaagagaaagctccgtcatgctcaagtcaggtgcggcagcgctgatcgcttttttggtttctcccagttctgcaaaagaatatgttaaatagccgttctcttttacgcttgcggccgcttgatcaagcggtttttccgtaagaagccctttagcgacaggccctcttgcgactacgctgattccgttctcctctaaaaggggaagccactcctcgggacgccggtccagcaggctgtattgcatcataatgctggtgatatttgattttttcacatattctttaataacattcggacgaatcgaggaaatgccgtaataccggatgacaccttcctgttttaagtcctcaaatgcttcgatcgtttcgtcaatatgatcttccatcgtgccgccatgcagctgataaaggtcgatatagtccgttttcagccggcgcaggctgtttttgaccgcttcttttatgtatcctttggaagcgtcccaatgccagccgtctttatcatcattccagcggtttccggctttcgtggctaaaatgatgtcgtgtctgcggtttttgacggcctccccgacaatttcctcatttctgccgaaatcataaagatcagcggtatctaaataattgattccaagctcgatcgcttcatccaaaatagacagcgctttaactttatccgtgcccagcgacatacagccgagcccgatttcgcttatttctaaatcagaatgtcccagtgtgcgttttctcatcgtttcgctcctttttatagtcttttattgaccgtaatataaaggcgcgaagttttcaactgttaaggcccggtgatccaatctccgacatagcggaatgtccgtccgtattctttcagtttagcccgcacttcccacgcctttccgaccaatacgatacttttatccttccggtacaccttcaatcgaaaagcacctccctctcatgcatgtatgataaaatatatgaggcataatagagagacagaacgggagatgacatgatgagacatttagaagaaaaaacacttgcgaaaaaaaagctgtatgacgggaaagtcatagatctttacttagaggatgtagagctcccgaacggaaaaacaagcaagcgggaaatcgtcaaacatccgggagcggtggccgtacttgcggtgaccgaggaaggaaaaatcattttggtgaaccagttcagaaagccgctggaacggacaatcgttgaaattccggccgggaagcttgaaaagggggaagagccggaacatacggcgttaagagagctcgaggaagaaacgggatatacggcggaaaccttgacgaaaatcaccgctttttatacatcacccgggtttgctgatgaaatcgtgcatctctttcttgcggaagggctttcgccgctggaagaaaaacgagagctggatgaggatgaatttgtcgaagtcatgcaggtcacgcttgaagaggccgtgaagctgattgaatcccgcagggtgtatgacgcaaaaacggcgtacgcgattcagtatctccagctgaaagaagcgctgaaggaaaaatgatgaaaaccatctatgcggatctgcatattcatatcggccgcacctatacgggaaaaccggtcaaaatcaccggagccaaaacgttgacgctgcaccggattttagaagaagccagtgaggggaagggaattgaactattgggcatcatcgactgccattccccggaagtcatagaagaaatcgagcgcggaattgatgaaggcagataccgtgagctgaaagaaggcggcatccggtatcggaatacgacgcttctgttgggcagtgagcttgaaatctatgatcacacatgccgcgggccgattcacgttctcgtctttatgccgtctcttgccgaaatgaagatgttttctgagtggcttgcaaaaaggcttaaaaatatccatctcagttcccagcgcatttatgaaaccggtttgaatcttcaaaggaaaacaaaggaattgggcgggctgtttattcccgcccatatgttcaccccgcataaaagcctgtacggaaaaggagtcatatcttctttgacagaagttttcgacccggcgctcattgacgcggcggaactcggattaagctgtgacaccgacatggcttcgcgggtaacagaacttgatccgtatacatttttaacaaattctgatgcgcattccttaggaaaaatcggcagagaatataatgaaatgcttcttaaagaagcgaatttcacggaattttcgctggctttaaaagggaaggacggaagaaaaatcacggcgaattacgggctgaacccgaagctcgggaagtattaccggacggcttgcgaccgctgcggcagcccggttgaaaaaggagcttccgcatgtccggagtgcggggggaaaacaatgacaaaaggggtcagtgaacggctggaggaactgagcggaccgaaaaaaagccgcatgccgcggccgccgtatattcatcaaatcccgctgcagttcattcccggggtcgggccgaaaacgttagaaaaactgaagcgggccttcgggacggagatggcgattcttcatcaggcgcaagaagaggaattggcgcgtgtcgtccagcctaaaatagcggctgtcattcataaagcgcgtaccgggcagctcgtccttgaggccgggggcggagggacgtacggcagaatcaagccgtaaaagccggtttttagcggagctcctcctgcaccttctttttcgtgcggacaaacgcaatcaattcgatgatttcatcctgattcagcggctgtccgtcaacggtcagtgtgccgcggccttgtgcggcgtttgttaattcgatggtctgggcaaacggctccgcctttttttcagtgcgcccgagtaaatcgtcgcacgtcgtgtcaaacagatcggcaagcgtgcctagcgcctcgaatgacggacgccggtatcctgattcatacccggcgtacgtgcttttggcgatgccgagacggtcagccgtatattgaagagaccaatttttcttttttctcagttcagttaaacgatctaaattcatattcaaaaccgctccttttcacttgagcaaattatatcatatcgatatgcaaaagtgtacgcgaattgaataataatcacttgattaatttcattcgtctgtctataatttgattaaaagtatgcgaaaagcgaatgcttaacacatcttgagaaatggatgaagaggtgcagggtatgaaaaaattattgctgttaacaaccggaggaacaatcgcctcagtcgaaggagaaaacgggcttgcacccggggtgaaagcagacgaattgttaacctacgtatcaaaacttgataacgattacacgatggaaacccattcgttaatgaacatcgacagcacaaatatgcagcctgaatattgggccgaaatcgcaaatgctgtcaaagaaaaatatgacgcatatgacgggttcgtcattacgcacgggacagacacaatggcttatacatcagcggcactgtcttatatgcttcagcatgctgataaaccgatcgtcattacgggttcgcaaatcccgattacatttcaaaaaaccgatgccaaaaaaaatatcacggacgcgatccgcttcgcatgtgaaggggtgggcggcgtatacgtcgtatttgacggcagagtcattcaaggcacacgcgccattaaattaagaacgaaaagctatgatgcatttgagagcattaactatccgtatatcgcgtttattaccgaaaacggaattgaatacaacaaacaagtgcacatcccaaaagacgatgcttttacggtcaatacttcactttgcacggacgtgtgcctgctcaagctccacccggggctgaaaccggaaatgtttgacgcattaaagggcatgtacaaaggaatcgtcattgaaagctacggcagcggcggtgtgccgtttgaaggaagagacattctcgccaaagtcaatgaaatgattgaaagcggcattgtcgtcgtcattacgacacaatgtcttgaagaaggagaggacatgagcgtctatgaagtcggccgaagagtcaatcaagatctcattatccgctccagaaatatgaacacggaagccatcgtgccgaaattaatgtgggcgctcggccagtctcacaacttggctgaagtcaaaaacattatggagacaccgatcgcagacgacgttgtactgtaaaaacatgactaccacaaagagaaagtagggttttagcatgacaaacgcgcaaaaagaatatcgtcaggaaaaagatttcctcggagaaaaacaaattgaagctgatgtgtattacggaatacaaacgctgcgcgcgaaagaaaactttccgattaccggctaccgcatccacgaagaaatgattaatgcgctcgccatcgtcaaaaaagcggcggcgcttgccaacatggatgtaaaacggctgtatgaaggaatcggaaatgcgattgtacaggccgcagatgaaattcttgagggaaaatggcatgaccaatttatcgtcgatccgatccaagggggagccggaacgtccatgaacatgaatgccaacgaagtaatcggcaacagggctcttgaaatcatggggcataaaaaaggtgaatacattcacctcagcccgaacacacacgtcaacatgtcacaatcgacgaacgacgtgttcccgacggcaatccatatttcaacattgaaacttttggataagctccttgatacgatggcgcatatgctcagtgtctttaaagataaagcgaaacaatttgattctgtcattaaaatggggcgcacacaccttcaggacgctgtgccgatccgtctcggacaggaatttgaagcatacagccgcgtgcttgagcgtgacataaagcgaattaaacaatcccgccagcatctgtatgaagtaaacatgggggcaacggccgtaggtacggggcttaacgccgatccgcgctacatagaacaggttgtgaaacacctggctgacatcagcggactgccgcttgtcggcgccggccatttggttgacgccacacaaaacactgatgcgtatacggaagtttcagccgcgttgaaagtatgcatgatgaacatgtctaaaatcgccaacgatctgcgcttaatggcttcaggtccgcgcgcgggacttgcggaaatttcactgcccgcccgtcagccgggatcatccattatgcctgggaaagtcaaccctgtaatggcagagctgatcaaccaaatcgccttccaggtcatcgggaatgacaatacgatctgcctcgcttcagaagcgggccagctggagcttaacgtaatggagccggtactcgtatttaacctgcttcaatccatcagcatcatgaataacgggttccgttcatttaccgatcattgtctggcgggaattgaagccaacgaaaaacgtctgaagcaatacgtggaaaaaagcgtcggcgtcattacagcggtcaatccgcatctcgggtatgaagcggctgcgcgaattgcccgtgaagcaatcatgacggggcaatctgtaagagatctttgccttcaaaatgatgtactgacagaagaagaattggatatcattttgaatccgtatgaaatgacaaaaccggggattgccggaaaagatctattagaaaaataaattttaaagcaacaacagccgccttttcacgttttttagtgaataggcggttgccatacaaagggatgaggcagtatagtataatttgttatatcatttgatgaaagcgttttagcttttttcttctagggggattttcttgtgaaagaggccagattgccaaatttattggaaattattatcttattattcgggtttttagcgcttgtcttatcatttacagtatttttagacctgccgattcagcttgctctatttatatcctggtttatcgctattattctcggagtcagactgggatattcatataaagacttgcaggcttcgattgtcaccgggatatcaaacggtcttgaagcagtgttgattcttgtttcggtcggtgcgctcgtcgggacatggattgccggcggcgttgtgccgacgttaatttattatggtttagagtttattaatcctcatgttttccttctggctacactggttatttgttccgttatgtccgttgcgaccggaacgtcgtggggaaccgtgggaaccgcgggaatcgccatgattgccatcggagagggaatgggtataccgcttccgatcgtggcgggagccgttttgtccggcgcttacttcggagacaagctttcaccgctgtctgacagtacggtgcttgcctccacgctttctaaggtggatgtgctgtcacacgtcagagcgatgatgtatctgtcaattccgtcctatattattacggccattctgtttaccgtaacgggatttatatacggcggaaaaaatattgatcttggcaaagtggaatttttaaaatcttcattgcagaaaacgtttgacattcatatatggatgctcattccggctgttgtcgtcgttgtccttctgattttgaaaaagccgtctatgcccgttatcgtcatcggtgctttgcttggcgcaatctgggcttccgtctttcagggaatgaattttgccagtgccatcgcgactgcttataatggtttttccattaaaacggacgtcgaatttttaaacggcctgttaaaccgcggaggcattaccggtatgctggatacgttagtcgttatccttttcggtcttggttttggaggaattcttgagaagctcggcgtattaaaagtgattgtctcaacttttgagaaaaagctgaccacaccgggaaatgtgacgctttcgacattgatcgtcgcccttttaggaaacattttcggctgtgcgatgtacgtgtcattgatcctgacgccgaaaatcatggagaacagttatgataaactgaaacttgacagaagagttttatcccggaacgcagaggtgggcggcacgcttacttcagggatggtgccgtggtctgataacggcatctatatggccggcattctcggcgtatccacattttcttatctgccgttcatgtggctcagttttgtatctatcggactggcaatattgtacgggtacacggggaaattcatttggtacacgaaagaaaaatccttgcaatctcaaaaattgggttaggaggttcatttcatgattacaaagcatatgattcggacgttaatgattgaaacgccgactgttcccggaaatctcggaaaagtggcaaccgccatcggagtgatgggcggagatatcggggaagttgaaaccgttaaagtcggcccgaactacacaatgcgcaacatcactgtgcaggccgaaaatgaagagcagctgcaggaaatcattcaagccattgaagctctcggtgaaggcatccggcttcatacagtctcagatgaagtgctctctgctcatgaaggcggcaaaattcagatgaaaagcaaaatgccgatccggacattggctgagcttggccgtgtttatacgccgggtgtcgccgatgtgtgccgactgattgaaaacgagcctgataaagcgtccatctatacgacaatcagcaattctgtcgccattgtcaccgacggaacggcgattctcggcctcggcaatatcggctctgtcgccggaatgcccgtaatggaagggaaagccgcgctttttgaccagctggcgggtatcagcggaattccgattttgctcgatacctctgatccggaagaaatcattcgcacggtaaaacatatttccccggggttcagcggaattctgcttgaagatatcggttcgccccactgctttgacattgaagaccgcctgaaagaagaactggacattccggttatgcacgatgaccagcacggcacggcggtcgtcacgctcgccgcagccatttccgcttgtaaaagcgccggtcttgatttaaaagaagcgaaggtcggtcagatcggtctcggcgcggcaggcgtcgccatctgccgcatgtttatggcatacggagtcaaagcggtctgcggaacggacaagtcagaagacgcaatgaaccgcctcgctcagtacggaggtcagccgcttggaagcatcaaagaattaatggacacgtgtgacattgtgatcagcaccacaggagttccgggtctcattaaaaaagaggatgtcagaaaaggacacgtcattctggctttatctaatccgaagccggagattgaaccggaagaggcattacaagccggagccgcttatgcagctgacggccgttcggtcaataatgttctcggcttcccggggattttccgcggcgcgctgaacgccaaaagcaagaaaatcgaccatgaaatgcttgtggcggccgcagaagccatcgcctcttgcacaaaacacggcgatctcgtgcctcagcctttggatgccgacgtgcatcaagccgtatcagcagccgtagaacgggccgcggcagggaaataaacaactcttacagtaccggatgtgtgccggtgctgtttttttatcatgaataggaagcggaattcttaggcaggctaacagatagcaaaagacggaataaagaggtgtcgatgtggattattttccgctgatccatacaaatatttgggatgctgtgatcggcgtgccggtcgtcttatgcgtcacacagctgatcaaagtgttctgccgggttccgggcatattcgttcccacgattgcccttgctgccggaaatatagtgtctatcgttttcggtcatcatgaacacgtgtatgcggggatttttatggggtttttttacggatacgccgcaatggggagctattcatctgccaaaacgtctctgcgcgcttaccggtcgaaacatgagccgtattcatgaacacatctggatttttttgttatgataaagaaaagggaaaaaggagcgattggcacatggcgaagagcaaaacgaaaaaaatgcgggagcatctcaaaagaaacggaatgcgtgacgcagtcctgtcaagggggacggcgccgtctttcagcacccatgaaagagtgacgaagaccaaaaaagacaggcttgaaagaataaagcataaaaaaaggaacccctatgatcaccggagtgatgacgggggttctttttttatgcccgaatctcgcgtctttctatgatttctctgtcatgttttctcttttctttcatacaatctactaaatcaagtcaatagattagcgggaggaaagcggtatgagaaaacaatcgtacaaagaactgttttttcgccatgtaaaggatcatctgtcactttatatatttgtgttcgtcttgttttttatgggagtcattttcggggcgatcatcgtcaacagcatgaccatcacgcagaaagaagatttgtattactatttaagcaagtttttcggacagctgtctgacggaaaacatgccggcgcttcagaaatgttttggcaggccgtctttcatgatgtaaaatatttggggctgatgtggatcctcggtatttccgtgatcggtcttccggttattttcattatggtgtttttaaaaggaatcgtcgtcggcttcacggtcggttttttagtgaatcaaatggggatgaacgggtttttcctgtcatttatttcggttctgccgcaaaacgtcgttctcattccggcgtatcttatcatggggacatgctctatcgctttttcactgaaactgatccggcagctgtttgtcaaacgcagccttcatgacgcgccgatccaatggttcggacgttacgccttcgtgctgattctcatcgttttcttctcggtcatcgcttcgctgctcgaggcgtacgtgtctccgctgtttatggaaaagctgtcatcacgcatattttagaatgattatcacaaaataatacttttatttatcagtttataataattatagttggaactctgcgcgtattttgttataatgagtcatggaatgcggcgtaggagggaaagacatggaaaaccgtattgatcgaattaaaaagcagctgcactcgtcaagctacaagcttacgccacagcgggaagcaacggtaagagtgctgcttgaaaacgaagaagaccatttaagcgcagaagatgtatacctcctcgtaaaagagaaatctcctgaaattggtctcgctacagtataccgtacattagaattattaacagaattaaaagtcgttgataaaattaacttcggggacggcgtatcccgctacgaccttcgcaaagaaggcgcggctcactttcatcaccatttggtgtgcatggagtgcggagccgtcgatgaaattgaagaagatctgcttgaagacgttgaagaagtgattgaacgtgattggaaatttaaaattaaagatcatagattgacttttcacggaatctgccaccgctgccgcggggatgaaacagagtaaaagcctacgaaccttttctgccaggaaagggttttttgctgtttttatgtataaaagcctttgaaattggcataaggtgtactaacagccgccaaaagaaagggtcgatcgaaagatgggcagattcttaaaaacagccgcggatacgatcaaagtgtttattctgttcacaggttttaccgcgctgttctattatgctatgatatgggtgaattcagagtatgaaaactatcatcggtacgataaaccggaaggctccgccgtcaaagtggccaaaacggaacatgaggagaaagacggctggttcggccgattgatctttttttaccaaaacggggagtagatcaagagtgaaggatcaaattaaggatttcatccattatgtgagggttgaaagagggctgtcccaaaatacgatgatgtcctatgagcgtgatctgaaaagttattctctcttcttaactgaaagccttcagatcacttcatggaatgatgtgacccgtcttcatattattcaatatttaaagcatataaaggactccgggaaatccggcaagacgtctgcgaggcatttggcgtcgatccggtcttttcatcaatttctgttaagggaaaaagccgcggataaagatccttcggtacatattgaaacacaaaaaacagagcggacgcttccgaaagtattggcgcttcacgaagttgagcggttattggacacgcctaagcttgacagcccgttcggtctcagggataaagccatgcttgaactgctgtacgcaaccggtatcagggtcagcgagatgatcgagctaaaattatccgacgtccatttgacgatgggatttgtccgctgcttcggaaaagggcggaaagagcggattgtgccgattggtgaagccgcttcccatgcgatagaagcatacattgaaaaagccagagggaaattattaaagaaaaacgtaaccgaagcgctttttctgaatcatcacggcaggcagatcagccgtcagggattctggaaaaacctgaaaaaaatcgcccttgaagcggggattaaaaaagagctgacaccgcacacgctccggcactcctttgcaacgcacctgctcgaaaacggggcggatctgcgcgccgtgcaggagatgctcggacatgccgatatttccacgacgcaaatttatacgcatgtgacgaaaacaaggctgaaggacgtgtacaaacagtatcatccgcgcgcttaggagccgctgccagaggggccgcggcttttttgccggattggcggaatacagagaaggttctaattatttgaatcggcattgtcaacaagaatgtaaacggtttatacttgagttgtctgacctctgtaagctacaatggacagatggaagaaaaggaggcttttatgatgtctgaatacaaatataaccgggtatttttgatcgtaatggattctgtcggaatcggtgaagcgccggacgccgccgattttaatgatataggcgcaaatacgctcggacacatcgcagagcacatgaacggcttacatatgccccatatggcgcagctcggtctcggactgatcggagacattaagggcgtggaaaaaacggagcaccctcttgcgtactacggaaaaatgcaggaggcgtcaaacgggaaagatacgatgacggggcactgggagattatgggcctctacattgaaaaaccgtttaaagtgttcccggaaggatttccggatgaacttcttcaggaacttgagcggcgttcaggacggaaaatcatcggaaataagccggcttcaggcacggcgattctggatgagctcggaaaagaacatatggaaacgggtgcgctgatcgtttatacatcagcagattccgtactgcagattgcggctcacgaagatgtcgttccgcttgacgaactgtacagcatctgtgaaacggcaagagaactgacgcttgatccgaagtacatggtcggccggattatcgcaagaccgttcgtcggagaaccgggcagcttcaaacgcacgccgaaccgtcatgattatgcgctcaaaccgttcggccgcacggtaatgaacggaatgaaagacagcggattagacgtcatttccatcggcaaaatttctgatatttatgacggagaaggcattacatcttcccgccggacggtatctaatatggacggcatggacaaagtgattgaaacgctcggtgaagagttcacgggcctgagctttgccaacctcgttgattttgacgcgctgtacggacaccgccgcgatccagaagggtacggaaaagcgctcgaggaattcgacgcaaggcttccggaagtgtttgagaaaatgaaagaagacgatctgcttatcatcactgcggatcacggcaatgatcctgtccatcacggcacggatcacacgcgggagtatgtgccgcttcttgtgtacagcaaaaagcacaaacacactgaacagctgccgcttgcggatacatttgccgatatcggcgcaaccattgcggataatttcaaaacggaaaagccggaatacggaaaaagctttttatcaagattacagtagggggactttttttgaaacaaaagatcgaacgtgctgctgcatttattaaagaacacgtgaaagaaacaccaaagatcggtctgattttagggtcagggctcggcgtattggccgatgaaattgaaggagctgtcaagcttacatatgaaacgatccctgattttccggtctcaacggtagaaggccatgccggccagcttgtgatgggaacgcttgaaggtgtgcaggtcatcgcgatgcagggccgctttcattactatgaaggctactcaatggatcaggtcacatttcccgtccgcgtaatgaaggcgctcggcgttgaatcccttgtcgtgacgaacgcagccggcggtatcaacactgaattccgggccggcgatctgatgattattacagaccacatcaactttacgggcaccaacccgttaatcgggccgaacgaagctgaattcggaccgagattcccggacatgtcagaagcctatgacaaagagctgtcaggcttggctgaaaaaacggccgatgagctgggcattcctgttcaaaaaggggtgtatacagctgttacggggccatcttacgaaacgccagctgaggttcggtttttaagaacgatgggttctgacgctgtcggcatgtcgaccgtgccggaagtcatcgtcgccaaccacgcggggatgcgcgtgctcggcatctcatgcatttccaacgcggcggcaggtattcttgaccagccgttatcccatgaagaagtaatggaaatgacggaaaaagtaaaaggcggctttttgaagcttgtaaaagccgtagtcgcacgatctcaaaaataagtcagcatcagtcagctgtttcttcggaagcagctgtttttttgtgccctcaacacgaaacattttccagatgaggcgtataaaaccaccggatttggaaaaaataaaaaggattatgaaatggagggctatggagatgaaacgtcttatatccactttgttgattggcattttattaacggcatcagcaccgtccgcttttgcaaagccggacggaaaacatacatcggagctcgctcatgaagccaaaagcgccgtgctgattgaacgcgatacgggaagcattctttataacaagaacagccgggagcgtctggcgccggcaagcatgacgaaaattatgaccatgcttttaatcatggaagcgcttgacaaagggaaaataaagatgagcgataaagtcaggacgagtgaacatgccgcgtccatgggcggatcacagattttccttgaactcggagaagaaatgacggtaaaagaaatgctcaaaggaattgcgatagcttccggaaatgacgcatccgtcgcaatggcggagtatattgccggttcagaagaggatttcgtcaaccggatgaacaaaaaagcaaaagaattgggattgaaagatacctccttcaaaaacccgacgggactgcctgaaaaagaccattacagctctgcttatgacatggcgaaaatggcgaaggaattattaaagtatgataaaatcactcaatttacgggaacgtatgaggattatttaagagaaaatacagacaaaaagttctggctcgtcaatacaaaccggctgatcaaattttatccgggtgtagacggcgtgaagacgggctttacaggcgaagcgaagtattgtttaaccgccaccgctaaaaaaggaaatatgagggtcattgctgttgttttcggagccagcactccgaaagaaagaaatgcccaagtgaccaaaatgcttgattacgccttcagccagttcaaaacacacccgctgtacaaacgggatcaaatcgtcggaacggtaaaagtgaaaaaaggaaaacagaaactgatcaagctgaccacatctgagccgatttctcttctggccaaaaagggagagaacatggacaaagtaaaaaaagaagtgaaaatcaacggcaatgtaacggctccggttaaaaaaggagacgtgctcggcagcctcgttctgaaaaaagacggaaaggtgctcgttgaaagcccggtcacggcaaaagacgacatggaaaaagcgggttttctcacttttctgaagcggacgatgggagattggactaaatttaaataatcgtggcgaacgggcactagttttgtcatagtgaaggaattgctttcccgaaaatcgaaacactcattatccgatcatatcaaggaggaatgagcatgagccttggaattgactttcatgtcaaagaatccgtgctttgtattcgattaacaggtgaactcgaccatcatacggcagaatcattaaaacaaaaggttactgaatcgctggaggctgacggcatccgtcacattgtgctgaaccttgaagatcttaccttcatggacagctccggcctcggtgtgattttagggcgttataaacaaattaaacagctcggcggagaaatggtcgtgtgcgcgatttcacccgcggtgagacgtctgtttgacatgtccggcctgtttaaaatcatcaggttcgaacaatcagaacaaaaagcgcttttaacgttgggggtggcatcatgaaaaacgagatgcatcttgaattttcagccctcagtcagaacgaatcgtttgcgcgcgtaacagttgcttcttttatcgcacagctcgacccgacgatggatgagctgacggaaatcaagaccgtcgtatcagaagcggtaacaaacgcgatcatccacggctatgaagaaaactgcgacggaaaggtgtacatctccgttacgctggaggatcatgtcgtctatctgaccatacgtgacgaaggtctcgggatcacggatcttgaggaagcgcgccagccgctctttacgacaaaacccgagcttgagcgctccggaatgggctttaccattatggaaaacttcatggatgatgtcacgattgattcctcgccggagatgggaacgacgatacgcttaacaaaacacctatcaaaaagcaaagcgctttgtaattaaggagatttgttatggatgtggaggttaagaaaaacagcaaaaacgcgcagctcaaggaccatgaagtcaaagaattaatcaaaaagagccaagagggcgaccagcaggcaagagacctcctcatagaaaaaaacatgcgtcttgtgtggtccgtcgttcaaaggttcttaaacagaggctatgagccggatgatctgtttcagatcggctgtatcggattgttaaaatccgttgataaattcgatttgtcctatgatgtccgtttttcaacttatgccgtgccgatgattatcggagaaatccagcgcttcatccgcgatgacggaaccgtcaaagtttcaagatctttaaaagagctcggcaataaaatacgccgggcgaaagatgaactgtcaaaaacatacggaagagtgccgaccgtccaggaaatcgcggaccatttagaaattgacgcggaggatgtggtgcttgcgcaggaagcggtgcgggcgccttcatccattcatgagaccgtatatgaaaatgacggagacccgatcaccctgcttgatcagatcgccgatcattcagaagagaagtggtttgacaaaatcgccctcaaggaagcgatcagtgatttggaagaacgggaaaaactcattgtctatctgagatattataaagatcagacacagtcggaagtagccgaacggctcgggatttcccaagtccaggtatcgaggctggagaaaaaaatattaaagcagattaaagtgcagatggatcatacggaaagctgaccttttacgggccggctttttttatttgtgtatcggtggtaatttatggtcttttgccgctgatgaatgagaacaaaagtgaaccgcatactacatatataaccacccgaaagatggtgatgcaagatggaaagacgaatatttctcagacttcgccaccgcgtgaaggctcataccggagatatcatcacaatcggcgacgccgcgcagattgcgggacagcaaaagctgaaaaaaaaactgtcggcactgccgctgtataaggtcacgaaaaaagataaaaatatcgtcgtgctggacatcataaaagtgctgaaaaccattcataccgcttttcccgctcttgatgtacagaccgtcggcggcgctgaaacgatagtggaaatccattaccaaaaaaagcagctgtcagccgttttgttcgtcggtgtctggctcctgctttttatcggttcatgtcttgccattatgaattttcatgaagatgtcagtatgagagaagttcatatcgccttatatgaaatcataacgggcgaacggaatgaatatccgtatctgcttcagattccatacagcatcggcctcggtctcggtatgatcgtcttttttaatcacatcttcaaaaaacgcctgaatgaagagccaagcccgctggaagtcgagatgtttaattatcagcttgatctcgatcattatgtcgcaatgcacgaaaatgaagagacgatgaaagatctgcatgatcgttagcattcttttcgttatgtttgtcgggcttggcggagggctgaccgtgggtgcgggctttgtggcttttttaaccgttatgggaatcgtcccccgccttatgcagctgacaaaaacaatgcgctttgtacaggcctacgaaggagctgttatttcaggagctgtgttcggcggctgggaaaccttaaatatgaatcatttttttttatctgaatggctggccgttccggtcgggcttttggccggcatgtttgtcggcatgctggccgccgcgcttacagaagtgctgaatgtgcttcccattcttgccaaacggatcggcttcggcagcaaaatcatcatattgctgatggccattgtgttcggcaaaatagccggctctttatttcattggctgtattttatccatcattcataaggaggaaccgacatgacaaacttaaaagaaaattacaaaacaaaagtgaaagactatcagccgaaaccgccatatgtttggaattgcgtcaaagcctttctgatcggcggtttgatctgtctgatcgggcaggctcttcaagacttttacatccacttttttaattttaatgaaaaaacagcgggcaacccgacggccgccactcttattttaatttccgcccttttgaccggattcggcatttatgacagactcgggcagtttgccggagcgggttcagccgtgccggtgacgggttttgctaacagtatgacaagcgccgctctcgaacacagaagtgaaggactcgtactcggagtagcgacaaacatgtttaaattggcgggaaacgtcattgtattcggcgtggtggcagcctatatcgtaggcctgatacggtttgcttgtgaaaaactgttttcgtaggaggagaaaaaatgaaattgaccggaaagcaaacctgggtatttgaaaacccgttatttgtaaatgcggcggggacggcagccggaccgaaagaaaaagacggcccgctcggttcgctgtttgataagacatacgatgaaatgcactgcaatcagaaaaactgggaaatggcggaacgtcagttaatggaagatgccatcaactccgctttgcaaaaacagaatttgaaaaagagcgatattgatttgttactcgcgggggatcttttaaatcaaaatgtgaccgccaactacgtcgccagacatctgaaaattccgttcctctgtctgttcggcgcctgttcgacttcaatggaaacgattgccgtcgcatccgcgctcattgacggcggttttgcgaaccgggcgatcgcagccacgagcagccataacgcgacggcagaacggcaattccgcaatccgacggagtacggcgggcaaaaaccggataccgccacttcaacggtcacggggggcggggcggtcatcatcagtcaaaacccttctgatatcaagattacaagcgcaacagtgggaaaagtaagcgacctcggaataacagatccgttcgatatgggatccgccatggcgcccgctgccgccgacacaatcaaacagcacctgcaggacttaaaccgcacggcggatgattatgatctgattttaacgggagacctttcaggcgtcggctcgccgatcgtgaaagatttgctcaaagaagaaggctatcccgtgggaacgaaacacgatgactgcggtcttctcatctatacgccggaccagcaggtgtttgcgggcggaagcggctgcgcctgctctgcgcttgttacgtacacacatatttttaaccaattaaaagcggggactctaaacagagtactcgttgtcgcgacaggagcgcttttaagtccgacaatgatccagcagaaggaaaccattccgaccatcgcgcacggtgtggtatttgagcgggcgggaggtgcatcataaatggaatatctgttggcttttgtttgcgggggaatcatatgcattatcggtcagctgctgcttgacatttttaaactgacacccgcccatgtgatgacaacttttgtcgtcatcggcgccttgttagatgggttcggaatttatgacaaatttatcgaattcgcaggcgcgggcgcgacggttcccatcgtcagcttcggtcacagcttattgcacggcgccatgcatcaagctcacgagcatggatttatcgggatcgccatggggatttttgaacttacttccgccggtatatcttcagcgattttattcgcatttcttgtagccgttatttttaaaccgaaaggataatgcctgatgacgaaacggaaggtcattcttgtgacagacggggacgtatacgccgccaaaacaattgaatacgccgcggaaaaagcaggcggacggtgtatttcccaatcaaagggcaatccgtcaacgagaagcggccccgaacttgttcagctgattaaagccgcgccgaatgacccggtgtttgtcatgtttgacgattcaggcctgcaaggggaagggccgggcgaaacggcgctgaaatatgtcgcctcacatcaggacattgaagtgctgggggtgattgcggtcgcttctaagacccatcaggcagaatggacgaaagtcgatgtctccattgaccgtgatggagaagtgacggagtttggcgtcgataaaaccggaatgagagaaatggacgagcacagaatgaacggagatacggtgtattgtctggataaattggacgttcccctcattgtgggcatcggcgacataggtaagatgggaagaaaagatgacatatcaaaaggctcgccgatcacgatgaaggcggtcgaattcattttagaaaggagcgaaagccatgccggaaaaaccggaaaacatgatcaaggtgtaccgggatcctagaaaaaatgaacaattttttaaagaccgcgtcggtatgggaacgagctatgatgtcggcgtccgcaaagttcgagtattagaccgggaagtccagatttactttgtcaacggattaaccgatactttgtttatcattcatttaatggaacagctcgtcgacgtcaataattatgacgagaatgcggatgaagcgattgacgttgttgaaaacagacttgtcaatcagcaggttcaaaaagtcaaaacgctcgacgaagcaacggatcaagttctttccggacttgtggcggttatcgttgaagacgcgggcttcgcctttatcgttgacgtcagaagttatcccggacgcacgcctgaagaaccggatacggaaaaggtcgtccgcggggcaagagacggttttatcgaaaatatcgtcattaatacagcattgatcagaagacgaatcagggacgaaaggctccgcgtcaaaattacgaaagtcggcgagcgctctaagaccgatcttgcgattgtgtatatagaggacatcgctgacccggaccttgtcagcatcgtcgaaaacgaagtgaatgcgattgacattgacggactgacgatggctgataaaacggtggaggaattcatcgtcaaacaaggctacaatccgtttccgatggtcagatacacggagcggccggatgtggccgccaatcacattttggaagggcacgtcatcatcgtcgtcgatacgtcaccgagcgtgatcataacgccgacaacgatatttcaccatgttcagcatgcggaagaatacaggcaggcgccttcagtgggcacatttttaagatggatcaggtttttcggtattatcgcttcaaccgttctgcttccgatttggttcctctttgttctcgaaccgtctcttctgcccgaaagattggattttatcggtttaaataaaaatacgcacatcccgatcattctgcaaatctttttggccgatttggggattgagtttctcaggatggccgcgatccatacgccgaccgctttatccaccgccatgggtctgattgcggcggtgctgatcggtcaaatcgccatagcggtggggctgttttcagcagaagtgattctgtacgtatcgatcgccgccatcggatcatttaccacgccgagctatgagctcagcctcgccaataaaatgatacgcctcatcttaatggttctcgtagccattttccaagtgaaaggctttgtgataggttttacattgctgctgatcataatggcgaatatccgctcgtttcacacgccgtatttatggccgtttttaccgtttaacggcaaggcgctgtggcaggtgctcgtccggacgacagtgccgggagcgaaagtcagaccgagcattgttcacccgaaagaccgtcaaagacagccaagcggttcataatcgcattgaaaccgacagaagattatgatattgtatgtcttaacttatacgggacttgtataaggacagctcaaaagaagctgtccttttcacccatatgcggatcagaaagagggaatgagcattgttcttacatggcacaagcagacaaaacaaactaggtcatttggaaatcggaggtgtggacgcgctgtatttagcggagcattacggcacgcctctttatgtttacgatgtggctttaatacgtgagcgcgctaaaagctttaaacaggcattcattgacgcggatttaaaggcgcaggtcgcgtacgcgagcaaggcgttttcttctgttgcgatgatacagctcgctgagcaggaggggctctcactggacgttgtatccggcggagagctgtttacggcggttgcggctggttttccggctgacaggattcattttcacggcaataacaaaagcgaagaagagttgaaaatggcgctcgatcatcaaatcggctgcattgtcgttgataatttttatgaaatatccttactcgcggaactgtgccgcaaatcagggcgcacaatggatgtgcttctgcggatcactccgggggtagaggcgcatacgcatgattatattacgacgggacaggaagattccaaattcggttttgatctgcataacgggcaaatagaaaaggcgattgaacaagtattacagtcagaccatatccgccttctcggcgttcactgccacatcggatcgcaaatttttgatacggcgggctttgtgctggccgcagaaaaaatcttcacaaaactgaatgaatggagagaatcattcggctttgtttctgaagtgctgaatttagggggcggctttggcatccgctacacggaggaggatgaaccccttcatcctgccgtttatgtggaaaaaattatcgaagcggtaaaagaaaacgcagcgctgcacgcttttgacattccggagatctggattgaaccgggacgctcgctcgtcggagacgccggaacgacgctttataccatcggttcgcaaaaagaagtgcccggcacccgtaaatatgcagcggttgacgggggcatgagcgataatatccgtcctgccctgtatcaggcgaaatatgaagccgtatcggcaaacagaatcggagaacaccacgataaaacggtatccatcgcgggtaagtgctgtgaaagcggtgatatgctcatttgggatatagatcttccggaagtgaaagaaggcgatcttctcgccgttttctgcacgggagcatacggatacagcatggctaacaactacaaccgcattccgcgtcccgccgtcgtttttgtggaagacggcgaagcgtatcttgtcattagaagggaaacttatgaagacattgtaaaactggatctgccgtttaagacgggggtcaaacaataaataaaaaagagaccggaacaatggcgtccggtctctttttgcattcagctgttagaacttgatccgctgtctcctgtaaatacagacacgatcgcattccaaatcgaagcgaagaaatcaatgactttttgaacaaagcttttgccttcatcggattgaatgaacttcgtgattttgtcttttgccttgtcaagctggctgccgacttggccccaatcaatcttggcatttttcattttattaaacaatgaaacgagctggtctttttgagcgtcagtcagtgtaatgttgaggtttgaagccgcatcatcgacctttttctcgattccttcttttgtatcgggcacaccgtttttcgcgaaatcatctttaatgtttgcgatgagcgcggaggcgtttttatccccgattttatccccgagatttgaagtggtgacaagctcttggttggcgacctgttttacatcttctgaaatcgctttgtctgatgaaacttcatatgccttgatgattcccgttaatgctgcggtgcctgatacctcaaacggcgccgtcacgtatactttcgcatctttcactcctgctgtcatcagggcgtttaagtacatttcatccgtgatggaatcgatattatgggtcttaacgtcaagcccggaccctttctttgccaccgtgatggatgatgaagagatggctcttgtgccgatttgggcattcgatatatattttcccagatattcatgttcttctttattcgtaaccgtcacttttgtcgcgttatcagggacatttaattcgtcaagcactttctgacggttttcgtttgacagatccgcccccagtgtgacgatgacatctccgactgcggcatcggccaggctgattttcggtattgtgcacaatacaacggccgccgccagcaatccaatccacatttttttcaaagcggttaacctccttcttttcaaaatgccgttttgaagcggtttgtgagggcctgcgtgaagcagttccgatacatagacggctgtgaagctgttctggtttcattttctttctgcggaagcggggagattcgttttccggctgaaggtgtggtataatagccgcgaaaagaagagcagaggcctcttccttcaaaagaatatcaaaaagaaagccggcttacaattgaaattcatattgaagaaggctttgacaaaaaacaatacggaagtaggaatgagaatgaaaactggttacatcgaaatggaaaacggcagcagaattgaatttgaactttatccgaatgaagcgcctaatacagtcgctaactttgaaaacctggcgaatacgggcttttatgacggcgttattttccaccgcgtgattccgggctttgtcagccaaggcggagatccgactgggacaggcatgggcggaagcggaaaaacgatcaaatgtgaaacagaaggcaatccgcataagcacgaagccggttctttatcaatggcgcatgccggtaaagacacgggttcaagccaattcttcatcgtacatgagccgcagccgcatttaaacggcgttcatactgtattcggaaaagtgacaagcggtttagagcatgcgaaaaacatgtctaacggagacaaaatgaaagaaatccgtgtagaaggataatgacggaaaacccgcctttttcaggcgggtttttttatgtatatgaaaattctcatgtgtaaatcatgaaaaaatacatatatgaacatcagcgatcattctggtatagtgaaaaagaccgattacaacaatgaaaagaggtagaaacgttggttcaattggcaaccgttttatttgtcattctcattctcgcacttatgatttggttcagggtgaaaaagggaaacaggccgattaaaggcggcggcttcggcatcattctcccgctattgattatcgccgtcatttttacattcagcatcagccagctcatgaatatcccgggaaagccgtttcattttcccgctctttgggagctcgccatcgccggactgttaggcgcggtattcggcgtcatcatgctgtcgcaaaccgcctatgaaatccgggaagacggctttgtctactccaagcggaataaaaactttaaatatgtcattatcgcgattattgcgatccgtatcgtgctcagccaatatttcaaaaacattgacgcggcggaattcgccgttttaacgatggaacttgcttttgtgtatttgtgcatttggcggatcggaagcttcgtgaaataccgtaaaatcagcagatccggcttataaaatgaaaaaaatggatgaggtgcggggcttatttgccctctgtgcagggattcatggtaaaataaaaacgaccatggctaatgggaggaaatcacttgaaatcagaaaaagaaaaaacttctaaaaaaagcgccgtacttgattgggcgaaagccattatcatcgctgtcgttctggcactgctcatccgaaactttttatttgccccttatctcgttgatggaagatcaatggatccgacgctgcatgaccgcgagagaatctttgtcaatatgacggtcaaatacataagcgacttcaaacgcggccagatcgtcgtgctgaacggagaaaatgagcactatgtcaaacggattatcggacttcctggcgacacggtgcaaatgaaaaacgatcagctgtacatcaacggcaaaaaagtgtccgaaccgtatttagcggcaaacaagcacaaggcgaagcaagaaggctatgaccggctgacagaagacttcggcccggtgaaggtgccggacgacaaatatttcgtcatgggtgataaccgcagagaatctatggacagccgcaacggcctcggtctctttacgaaaaaacaaatagcgggcacatcaaaattcgtcttcttcccgtttaacgaaattcgcaagacgaaataaaccgtacaggcagttttcttcatgaggaaaactgcttttttatataaatttatctttccaccctcaaaaacagaacataaattcgtatatctatttaatagatagaaagttttacagatacatgaaacatcttccctttatgaaacgttatatgaataactcacgcagggaagaacgtttttctattcatgaaaaaaaggaatatgacatagtaatgaatagattgatacgggctggaggtagaaaaatgggaagaattaaaacaaaagcagccattttacttgtactgctgctgttattagcgggcggttatatggtcataaacgatattgaactgaaagacgtgccgactgcaatcggacaaaccctgtcccaggaaaaagaagaatatacagtcaaaacatataaaattacgaaaatcgaaggaactgagtaccacggtacggcagaaaacggcacaaaaattatttttaacggcgacaagctgaagcaggatctctccgatgtgaaaaagggagataagattaaagcgtatttcagcaaatcaaaccggattgacggcttattgaaggtcgtcaaagtgaacgaataaataaaggcgccttttatgggaaaagggcgctttttatttttctgaataattaggtgcaaattcattgcgcctgccgcaaaggatgttataatagcggataaggacaaaaaaatattgattgtatccttcggggctgggtgaaaatcccgaccggcggtaataaggcgttttgcgctttacagcccgtgacccgtatgcatctgtatacggtggattcagtgaaaagctgaagccgacagtgaaagtctggatgggagaaggatgagagaagctatgcaaaaaataaacttactgtatagtcttatttcctatggattaaaactggcaaagccccgaactgtgtaaacattcggggcttttttgacgccaaattgcgtggaagaagggagggataacgatggaagaatattatatgaatacggcaatagaacttgccagacgcggtgaaggacagacacagtccaatcctcttgtcggcgctgtcgtcgtcaaaaacggacagatcgtcggaatgggcgcccatttgcaatacggagaagcgcatgctgaggttcacgcgattcatatggccggcagacacgcaaaaggcgccgatttgtatgtgacgctggagccttgcagccattacggaaaaacaccgccatgcgccgaactgatcataaagtcggggataaaaagggtgtttatcgctgtgaaagatccgaatccgcttgtagccggaaaaggcatcggaatgctggaagcagcgggcatcgaagtgaaaaccggacttctcaggcagcaggcagaagagctgaataaaatgtttcttcacttcatgcggaccggacttccgtatgtcaccttgaaagcggccgcgagccttgacgggaaaacagcgactgaaaccggtgacagcaaatggattacatcagaggcggcaaggcttgatgcccagcaatacaggaaatcgcatcaaagcattcttgtcggagcaggcacagtcaaagccgataatccgagcctgacctgcaggcttcctgatgcggtgaagcagccggtcagagtgattctcgatacaaagctgaccattcctgaaacggcaaatgtgctcactgacggcgctgcgccgacatggatatttacggccaaaggtgcagacgtgcaaaagacagaccggctgaccgcactcggaataaaagttattccgctggaaacagaccgcattcacgtccctgaggtgctcggtattctcgctgaaaacggcataatgtccgtttatgtggaaggcggagcatccgtacacggaagttttgtcaaggaaggctgtttccaagagcttcatttctatttcgcccctaaattaatcggaggaacgcttgctcccagcttgatctccggtgaaggttttcaatcaatgaaagatgtcccccatttacaattcacacaaatcacccaaatcgggccggatataaaactgacggccatacctaaagatggaaaggatggtgacgatgtttacaggaatcgttgaagaaacaggcacgatccaaacaatcaaaaagacaggcctttccatggcattaaccatcgccgcttcaaaagtgacaagtgatgtgaaacttggcgacagcattgcggtaaacggcatctgcctgaccgtaaccggattttctgacaatcaatttacggttgatgtcatgccggaaacagtgaaagccacttcgctgaacggcttgtcaaaaggcagtaaagtaaacctggaaagagcgatgtccgccaacggacggttcggcggccactttgtatcagggcacgtggacggaacggcggaaattacgcggatcgagaaaaaaagcaacgcggtctattacgatttaaaactttcgccggaattgacaaaaacgctcgtattgaaaggttcaattacggtagacggcgtgagcctgacgattttcggtttatcagacgaaagcgtgacggtatccatcattccgcataccatctcagaaacgatttttcagacgaaaacagtcgggtcgatcgtaaatattgagtgtgacatgatcggcaaatacttataccgctttttgcacaaaacagaacaaacgaaaagcaatcaaactatcacggaagcctttttaagcgagaacggcttttagaaaggaagatcgatatgtttcatccgatagaagaggcgttagaggcgctgaaaaaaggtgaagtcatcattgttgtcgatgatgaagacagagaaaacgaaggagatttcgtagcgctggctgagcatgccacgcctgaagtggttaattttatggcgacccatgggagaggcctgatctgcacgccgctgtctgaagacatcgccggccggctggatcttcacccgatggtcgatcataatacggactcacatgagaccgcgtttacggtcagtattgaccacaggctgacaaaaacgggcatcagcgcgcaggaacgatcctttaccattcaggcgctgttgaacgaagaatctgtgtctgacgattttcagcgtccgggccacattttccccttaattgcaaaaaaaggaggcgtcctgaagcgggccggccatacggaagcagccgttgaccttgcaaaagcctgcggatctcagggagcgggcgtcatttgtgaaattatgaatgaagacggcacaatggccagagtgccggagttagccgaaatcgccgaacgccaccagctgaaaatgattacgataaaagacttaatagagtaccgttacaacattacgacacttgtgaacagagaagttgatattacgctgccgactgacttcggcacgtttagagtttacggatatacaaacgaggttgacggaaaagaacatctcgcctttgtcatgggagatgtcccgtttaacagcgaacccgttcttgtcagagtgcactcagaatgcctgacgggcgatgtgtttgcatcccatcgctgtgattgcggacctcagcttcatgccgcgcttgcgcaaattgctgaagaaggccgcggcgttctattgtatttgcgccaggaaggcagaggaatcggtttaatcaataagctgaaggcgtaccgattgcaggaacaagggtatgacacggttgaagcgaacaaagcgctcggctttctgcctgatctgcgcaactacggcatcggcgcccagattctccgcgacttaggggttcagcatatgaaacttttaaccaataacccccggaagatcgccggcctcgaaggatacggtctcagcatttcagaacgggtgccgcttcaaatggacgcgagtgagcataacaagcaatatttacagaccaaaatgaaaaaacttggacatctgcttcatttctaaaaacaaatctcacaaaaaaggatggataacatatgaatatcatacaaggaaacctagtaggaacaggacttaaaatcggaatcgtcgtcggcagatttaatgaatttataacgagcaagctgttaagcggagcggaagacacgctgcttcgccacggtgtagaatcaaacgacattgacgtcgcttgggtgccgggagcgtttgaaatcccgtttgcggcaaagaaaatggcggaaacgaaaaaatacgatgccgtcattacgctcggcacggttatcagaggagcgacaacgcattatgactatgtctgcaatgaagcggcaaaaggcattgcccaggcgggaacggcgacgggcgtcccggttatcttcggcatcgtgacgactgaaaccattgagcaggccatcgaacgagccggaacaaaagccggaaataagggagcggattgcgcagtatctgccattgaaatggcaaatttaaaccgttcatttgaataatttgttgaaaagcgtttaaaacagcggcgaaaatgatataatgtgaggaaacggatcgcctttatgtatccgtttgataggacatgaatggacattttggatatagaggggtttttatgttaattcgttataaaaaatcgtttgaaaagattgcgatgggtcttctgtcatttatgccgaatgaaaaagatctcaagcagcttcagcagacaataaaggactatgaaacggatactggccgccagctctttctttggaaagaggatgaagatatcgtcggagcgatcggagtcgaaaaaaaggactcagaagttgaaatccggcatatcagcgtgaatccttctcaccgccatcaaggaatcggaaagcaaatgatggacgccttaaaacgtctgttcaaaacggaggcactcgttccgaatgaattaacgcaaagcttttttgaacgctgtcaacatcaaaaagatcaggatatctcatataataactgacaaatgctcccggaatcttcacggtttcgggagctgttttgatatagaaaaagcagggctgaccgtcagcctctgcttttttttcttctctcaatttcccgttcgcgttccttaatgacatccgtcctgtcccgcaggcggtgtttatgaataagaaaggtatctgatacgccgtcttgcccccatgtatagccctttcggcggcattcggcaagacatgcttctttcagggcttcatctgtaatcggcagcataacacttctgtaaggcacgcccgcttctatatcgtctgacagcgtttctatcagctcaatcagcttcggatggctgagaccgagggaacagaccgcctgcttttcagaccggagaatacgtaagctgttggcaatcagccgtttcgccccggcttcatttcccctgcgctggtgatacagagcgacggcaagctgaatcaggccgacccaatgaacgctccgcttttcagccgggctttctttccaatattcctctaacagttcatgacactcaaaataatctcttgatgcgtgaaattcggccaaaaagccgatataagctttaggatacaagccgcttcctccttttatgctaaaaccagtgtaccacagcgctatgaaaaggaaaaaagagcggcttggtgtctgaagcctgaggaactagcagatgtaagatgctcctacgacaacgagcaaaataaacagaacgacaattaatgcaaaacctccgccgaaacaagctccgctcatgtgaaatcagcctccctttgtttcaagtttacacggctatcatatgtgcatccgcctttaaaggtataggcgtatatcttctttttcagtattttctaaataacagagggtgtgtataaaagtattggacgagagcatttcggtggattatactaaagggtagccagtttttccggcaatgagagtgatattgaaaatggtgagataatggtagaatatcaagtgaaaattgatacgtttgaaggcccattggacctgctgcttcatctgattaaccgtcttgaaatcgacatatacgacatacccgtggcaaccattactgaacaatatttattatatgtacatacaatgcaagagcttgaacttgatgtcgccagtgaatatctggtcatggcggcgacgcttctcagcattaaaagcagaatgctgcttccgaaacaagaggaagagctgtttgaagacgaaatgcttgaagaagaagaccctcgggacgagctgattgaaaagctgattgagtatagaaagtataaaaccgctgcgaaggatttaaaagagcgggaagaagaaagacaaaagtcatttacaaagccgccgagtgatttaagtgagtatgcaaaagaaatcaaacagacggagcagaaactgtcggtgaccgtttatgacatgatcggcgcgtttcaaaaggtgcttcagcgtaaaaaaatcacgcggccgaaagaaacgaccattacaaggcaggaaataccgattgaagacagaatgaacgaaatcgtaaaaagcttaaaaacggcggggagaagaataaacttcacggagctttttccttctcggcaaaaggaccatctcgtcgtgacgtttttagcagtcctggaactgatgaaaaatcagcagattatcattgaacaggaagaaaacttttcagatatatacattacggggagtgaatccattcatggcgcttgatatcgtgaattggaaagcgattgtggaagccctgctatatgcggcgggtgatgaagggctgaccaaaaagcaattggtgacggtgcttgaaatagaagaagcggaactggccggaatcatggaagaagtggcggctcagtacaaggaagacgacagaggcatcgagcttaccgaatatgcggatacgtatatgcttggaacgaaaaaagaattcgtgccttatttgaaaaaactaatcgaagtgccgtcaaaagggctgtcacaggcttctttggaagtgctggcaatcgtttcgtacaagcagccgatcacacgggcggaaattgaagatatccggggcgtgaagtctgagcggattctgcacagcctcgtgtcaaaagcgctgctgtgtgaggtgggccgcgccgacggtcccggccgggcgattttatacggcacgacaccggtgtttcttgaacaattcggcttaaaaacattggaggagctcccgccgcttcctgaaaatgcggaggaagacgttctccaggaggaagccgatttattctttgaaaacttcaaccaaacttttgaggatattaaataataatcgtttttcatcatacgatagtagggaaaggccattgatgaatgacgcaaatgacgacgtacaagagaggaaggaaacggacggaaatgggaaattcgattgtgagggcccatactgaagaaactggtgaatttttagccgaggttgtcacgatggtcagcagctatttaaatcatacaactttgccggagatgcgggctcaaggagaggcggatgaggcatactgccgcgacgtgctcagtgtgctgaggaggatgaccgtcttttgcgaaggcgcccaggaagcctgccgccggcttttaatgcaggagccgtttcatgaggcgagagcggaaaaaacgctgtataaagtatatcatcagtgcgtggaagagtttttcatgccgaaaaaggatacatggtacgaaaacagccgcgccgcttatacaggccaaagcgcgattgaattctaccagcaagtgccggattcgctgcggagccttctgctttcgctcagcagtgaatttctgcgcatgcgggaagaattggcgcaatatgaagcatcaggctcaaatatggcaccagtcagataaaaactcttccttttgggagagttttttatgtgaaagtgatgcaattggtattcataagtcatggacatgcgcataaacttgtacaaacccacaacaaggacgtgagcattcatgcgctttctcaaaaaagctgccgtatttcttttgacttttgttattcttttttccattacagacggcaatacggcacatgcccaaatacatgtcagcgcaaaaagcgcgattataatcgacggagcatctggcagggtgttattcgccaaggatgaacatcataagcggcggattgcaagcattacgaaaatcatgacggcggtgctggcgattgaatcagggaagatggaagagaccgtgacggtttccccgaatgccgtaaaaacggaaggctcagccatttatcttcagccgggacaaaaagtaaagctgaaagatctcgtatacgggcttatgctgagatcaggaaatgacgccgctgcggcaatagcggaatatgtcggcggaagccttgacggttttgtatttttgatgaacaaaaaagccgagcaaatcgggatggaaaatacaaaatttcaaaatccgcacgggctggacgaccatgaaaatttatattcaacggcgtttgacatggcgcttttgactaaatacgcgatgaaaatcaaggaataccggaccgtttcaggcacaaaagtgtataaggcggaaacgatggaccgggtatggaaaaataaaaacaagcttctgaccgggctctaccgttacagcacaggcggaaaaacgggttacacaaaaatcgcgaaacggacgctcgtctcgacggcctcaaaagacggtacggatctcatcgcggtcaccataaatgatccggatgattgggatgatcatatgaatatgtttaattatgtctttgatcactataaaacctatgtcatcgccaaaaaaggcggcattccgaagctgaaaaagacgttttacggaaagcgcgcttttattgcccgggatgtcaaatatttgttaaaaaaagatgaaatcgacgatgtaaaaatcagcacaaccttaataaaaccgaaaaaagcctggaaaaaggaagcctctctcattcctgatgtcgtcggccggatgactgttatgcatgatgggaaagtgatcgccaagatccccgtctattatgaaaatgagcgccataaaaaaccgaaaaagcatttcattgagacgtttacgagcctgtttatgagcgcggcgggcggttcgtcatggtcaatttaatctgggtatgtctgacggtaatcggacttgtctttgcgatgtttaacggtaccttgcaggatgtgaatgaagccgtttttaaaggagcgaaagaagcggttacgatctcgttcggattaatgagcgttctcgtgttctggctcggcctgatgaaaatagccgagcagtccggccttttggatatattcagcagaatgtgccgcccgtttatttctaagctgtttcccgatattccccctgatcatccggcgatgggatacatcttatcaaatctcatggcaaactttttcggactgggaaatgcggcgacaccgctcggcattaaagccatggagcagatgaaaaagctgaatggaggtaagtctgaggccagccgttccatgattacctttttggcggtaaatacttcgagtattacattgataccgacaaccgtcattgccgtgcgcatggcttattcggcgaaatcaccgaccgatatcgtcgggccgaccatcttagcgactttaatttcgggaatcggcgcgattttcattgaccgctacttctggtaccgccgcaaaagaaaagggaggtaagcgaatggaaatggtgaattggctgtctttagccatgattccgattattatcgccggtatattgatatacggcacgatcaaaaaagtgccgacgtatgaatcgttcgttgaaggcggaaaagaaggaattgagattgcgttttccatcattccgtatttggtcgggatgctggtggcgattaccgtattccgggcctcgggtgcgctggattttgtcatggggctgtgcaagcctttctttacaacgctcggcattcccgcagaagtcgtgccgcttgctctgatccgcccgatttcggggacggcggcgctcggcatgacgactgatctgatcgccgtgtacgggcctgattcatttatcggcagactggcctcggtcatgcagggatcgactgacacgacgctgtatgtcctgacggtgtatttcggggcggtaggcatcaaaaaaatgggggatgctttaaaggttggtcttcttgctgatttgatcggggtggttgcatcaatcatcatagttacgttattatttggaagcgcctgaaatcaggcgctttttatatatcagaataactctccttgaaaaagcttgtttgttcaaggggaaaaaagtaagattatacttgaggtgaacgacatggaaagactgcaaaaagttattgctcatgccggcgtggcatcacgcagaaaggcggaagagctgataaaagaaggaaaagtaaaggtgaatggaaaagtaataacagagctcggcgtaaaagtgaccggttctgatcagattgaagtaaacggattaaaggtggagcgggaagaacccgtgtactttctgctttataaaccgagaggagtgatctcagcagctgatgacgacaaagggcggaaagtggtgaccgactttttcaaagaagtgccgcagcgcatttatccgatcggcaggcttgattatgatacgagcggacttttattgctgacaaatgacggcgagtttgccaacaaactcatgcatccgaaatacgaaattgataagacgtacgtcgccaaagtgaaggggattccttccaaggaacttctgagaaagcttgagcgcggcattcagcttgaagaaggcaagacggcgccggccagagcgaaaatgctttccctggacaaaagaaagcagacgagcatcattcagctgacgattcatgaaggccggaacagacaggtccgccgcatgttcgaggcgatcggtcatgacgtgctgaaactaaaacgtgaagaatacgcatttttagatttaagaggcctgcgcacaggagacgcaagagaattgtcgccgcatgaggtgaaaaggctgcgggctttagctgaacacggtaaaaacgctttctaattttcacataaccttcaaaaattacaaaacgtgttgatgatataattgaatggatttgcaggcaggggaggggagcagtgtacaatgaacaaaaaacggcggcgtttattcattcggaccggcatccttctcatcttactctgcgcgctcggatataccatctataatgccgtatacacaaacggtgagcgtatatctgaggggtccaaagccccgaatttcgcgctgaaagatacagagggcagactcatagaactgagtcagttaaaaggaaaaggtgtttttctgaatttctggggaacgtggtgtgagccgtgcaagcaggaatttccctacatggagaatcaatacaagcattttaaagacctcggtgtcgaggtggttgcggtaaatgtcggcgaatcaaaaattgcagtacataattttatgaaaacatacggcgtcaatttcccggttgcgctcgatactgaccggcaagtgctggacgcgtacggcgtatcacctattccgacgacatttttgatcaatcccgacggaaaagtcgtgaaagtggtgaccggcacgatgacagaacgcatggttcatgactatatgaatttaattaagccggaggcgtcttcatgaaaaaggtcaaatgtgaatgcgggcacgtgaatccagccgggacggttttgtgcgagtcgtgcgggaagccgcttgatgatcaaaaatcgccgcttgccgatatgcggtacgacggcagcgcaaggcgttcgcaaacatataataaaacaatcgtagataaggtatggaacttcttttcttccgtaaaagtcggaatatggctgatcgtcattactctggcggcgtctgctttcggcacggtttttccgcaggaagcttatctgccgccgggcgcccagccggatacatattatgaacagcagtacggcataatcggccaactgtattatctgttgggatttcatcacctgtacggctcatggtggtatatgctcctgatcgcatccattggcatatcactggtcatctgcagcctggaccgggtgattcctttgtacagggcgctgaaaaatcaaggagttcggcggaatccggtctttttgaagaggcagcgtctatacagccggacagaaaccgagctgagcggggatgcggctgatggcctcagaacacgattgaaaaaaaagcattatagagtgcgagaacaagagggaagcattctggcggaaaaaggccgtttttcaaggtgggggccctacgtcaatcatatcggcctaatcatttttctgatcggagccatgctgagatttgtacccggtatgtatgtcgatgaaacgctctgggtccgtgaaggcgaaaccgctcagatccccggcactgacggcaaatattacttaaaaaacaaccggttcacgatgcagacatataacaaagacactgagaaaaaagtattcgccgacgccattgacagagccggaaacggcaaagtcgccaaatccttcacaacggacgcggttttgtacaagagggaaggcgacattgtattcggtgaaaagccgaagcttaaaagagtcaaagaaaacaatatccgcgtcaatgaaccgctgcgttttgactcctattctgtgtatcaggtggactataaagaaaaccagctcgatcagatggtatttcagctgatcgaccaaaaaacaaaacagtcattcggcaaactgaagatcaatcttcttgatcccgacacggactatgatcttggtaacggttacaaagtgcagatcgccagttatcttcctgatttttattttaacaaggacggagaaccgagcacgaaaacgaaggttcctaacaatccggcttttgtctttaaaatcacggctcctgacaagccgaaaggggagaaaagttttgttgcgattcagcagactgttgaaggttccgaaagtaacaagtacaaattaaaattcgaccatgtggaaacgaaaaacattacaggactcaccgtcagaaaagatttaaccttatgggtgcttgccgtcggcggcgcgatctttatgatcggcgtcattcaaggaatgtactggcagcacagaaggatctggatcaaaacaggtgatcatgaagtgcttgtggcgggacatacgaacaaaaactggttcggtctgaaaaaagatatcgaatttgttcttagcgggaccgggattcaagagccagccgatcaaaaagaattggccaaaaatcaggcctagtgaaaaaggagtggtgtcatggcggagctgagcgcaaattttctttatgctgcctttttgatttatttaattgccgtcccggttttcggcggcgccatccggggaacaaaaggtgctaaggacggtaagggccgctggtcggctatcggaatcacgttaaccattttcggatttctttgtcatctcggctacttcattgcgagatggtcggcaagcggacatgcgcctgtcagcaatatgtttgaatttacgacgtcattcggcatgatgcttgttctcgcttttattattatttactttatttacagactgccttcattaggcatgttcacattgtctatcgcgcttttgcttatcgcatatgcaagcatgtttccgacagacattacgccgcttattccgtcactgcagagcaattggctgtacattcacgtcacgacggcggcgctcgggcaggcgattcttgcgatcagttttgtagccggcgtcattttcctgttaaagcatgtcgaccaatccagaccgggcaaaaaaacgttctggcttgaagtcatcatgtttatactcgtgacgaccgtggcatttatcgccgtcacgtcggcattccggctggcggactacaaagctgaatttaattgggtggataaaaaagaagctaaaagcgtcatgatatatgatatgcctgcgcttgtcggcccgcatgagggagaactgcttacggaaggcgcaatgaagccgcttattgagcttccggccattttttcaggcagaaaggtcaatacggtgatctggtcgtttggcgcaggtctcgttttatacggtgcgctcaggctgatattcagaaagagaatcagcgctcttatcagcccgctcgtcaaaaatgtgaatctggacttggtcgatgaagtcggctaccgcgctgtttccatcggttttccggtatttacactcggcgcgcttgtgtttgcgatgatttgggcgcagcttgcatggacgcgtttttggggctgggacccgaaggaagtatgggcgctgatcacctttttattttacgcagcgtatttgcacttgcggctgtcaagaggctggcatggcgaaaagtccgcgtggcttgccgtcatcggcttcgccattattatgtttaacttaatttttgtgaatctcgtgcttgccggacttcattcgtacgcatagatgcaaaaagccgatacagttctcaagctgctgcacagtttgttaaaatgaaagtaacagaaggaaagcagggggaaaacgatggatcaaacaaatgaaactaaaatattagtagtagatgatgaagccagaattcgacgccttttaagaatgtaccttgaacgggaaaactatgtgattgaagaagcggaaaacggcgacgaggccattaaaatggggctggcatcagattatgatctggtgctcttggatttaatgatgccgggaacggacggaatcgaagtatgccggcagctcagagaaaaaaaagcgacgccgattatcatgctgacggcaaaaggggaagaagccaaccgcgtccaggggtttgaagcgggtacggacgattatatcgtcaaacctttcagcccgagagaagtggtgcttcgggtaaaggcgcttttaagaagggcttcccaaacatcttatctgacagccaataccccgacaaaaaatgtgctcgtcttttcgcatctatccattgatcacgatgctcacagggtgactgcggacggcacggaggtgagcctgacgccgaaggaatatgaactgctgtacttcctggcgaaaacaccggacaaagtgtacgacagggaaaagcttttaaaagaagtgtggcagtatgaatttttcggagacctcagaacggtggacacccatgtcaaacggctccgtgaaaaattaaataaagtgtccccgggggcggcgaaaaaaatcgtcaccgtatggggagtcggatacaaatttgaggtaggcgctgaatgaagttttggaaaagcgtagtaggtaagctttggtttaccattctttcactcgtgttaattgttttatttatattaacggtgctgcttctggaatttatagaaaattaccacgttgaagaagcggaaaaagatttaacgcagcttgccgataaaattgcggtcataatagaaaatcatgaagaccagccgcttgccagatccatcacgtgggaactggcggacaatttaacgagcatcgcgatcattcaggatgataagcatgtctggtattcgcccaatgacgataatcatttatcctctattacattagagcagatcaaacatgaccgggatctgcacaaggcgctgacagaccgcaaaaaagtaagcaaacgcgcggtccccaacaatgccggttcggataacgaacggctgatcgtcggagtgccgtatgaaaaagacggcaaaaaaggcatggtctttttatcccaatcgctgcttgccgtcaaagatacgacgaaacatacgacacgctatatttttcttgcggcgggcattgccatcgtcttgacaacgtttttcgcgttctttttatccagcagggtgacatatccccttcggaaaatgcgggaaggcgcccaagacttggcgaaaggaaagtttgatacaaaaattccgattctgacccaagatgaaatcggggaactggccattgcctttaatcagatgggacggcagctcaatttccatattaacgcgctgaatcaggaaaaagaacagctgtccaatattttaagcagtatggcagacggggtcatcaccattaatatcgacggcaccattttggtgaccaacccgccggccgaacgttttctgcaggcatggtattatgagcagaacatgaacattaaagaaggagacaaccttccccctgaagcaaaagagctatttcaaaatgcagtgaacacggaaaaagagcaaatgattgaaatgacgcttcaaggaaggtcatgggttttattgatgtcgcctctttatgcggaatcacacgtccgcggcgccgtggccgtgctccgtgatatgaccgaagagcgcaggctggataaattgcgtgaagacttcattgccaatgtcagtcatgagctcagaaccccgatttctatgctgcagggatacagcgaagcaatagtggacgacattgcaagcaccgaagaggagaaaaaagaaatcgcgcagatcatttatgatgaatctcttcgcatgggccggctcgtcaatgatttgctggatttggccagaatggaatccggacatacgggcctgcactatgaaacggtaaacctgcatgaatttctggagaagatctcccgcaaattttccggggtagcgaaggaaaaaggcgtttcgctcacagaggacatctcagtgtctcagccggagtgtgtctttgatgaagacaaaatggaacaggtgtttaccaaccttatagataatgcgctgcgccatacggagtcaggcggaagcgttcatatcgcggctcagaccgtaaaagacggactgaaaatcgatattaaagattccggctcgggaataccggaagaggatctgccttttatttttgaacgtttttataaagcggacaaagcaagaacaagaggcagggcgggaaccggactcgggctcgccatcgtaaaaaatatcgtggaagcccacggcggctcaattgcggttcacagcagcatcgacaaagggacgacgtttacattttatattccgacaaaagtgcaggatgacgtctgaaattgacgaacaatcttgttccatacgaaacacccgcatgttctgcgggtgttttttatttgtttctcctttaaaaatttaagaatatgttaatataaattcccttccaaattccagtttctcgtaatatagttgtaatgtaacttttcaacgcatttttacgacaaaaaagtgaacggaggggtttcccatggaagaaacctttcagatattatatgatgcataccatcaagatttatatcaatttttattttatatggtaaaagataagtcgcaggctgaagatttgacgcaggaagtgtatatccgcgtcttgaattcctatcatacatttgaaggaagaagcagtgaaaaaacatggctgttatccatcgcacgccatgtggcgattgactggttccgcaagcagcagacgatcagacagcgtattatgggtacgtttgattgggatacacaagatgtcagagatcagcatttgcttccggatgaactcgccgtacagcatgaaaacgtccgggaaatatataccgcgcttgatcattgcaccattgatcaaagagctgttattatcttgagatttattcagggatattccattcaggaaacagccgccgctctccgcttctcggaaagcaaagtcaaaacgacccaacatagagggctcaaaatacttcggaaacagatggagcttttgagggaggagctaatggatgatgaagtcatattggaacgaagaaagagtagaggagttgttaagacaacttccggcggttagagatcatcgttcacccgaggccatttaccggaatattgaaacaggtaaaccgtacaggaaaaaaccggctcgaagctggatcggccccgccgcagccggcgtctgcgcattgtgcatcgctctgattatatctcctcacctgatgacaaacaaatctgccggtgatcttacagctgacagcggtcaagctgaaaaagccagtcagtcagctgctgtcaagccggatcagaagacgtttgtcgtttctaacgaaaacaaaaacaattacattactttggcgtttgccgattcagatacatccgccgtcataccggtcagttttgaaaaaaagaagccggatgaatcggtatcagaggctttatccgaagcagaaaacctagaagtgcccgaatccttcctgtctgtgccgaaccttttggaaggtgtgcaggtaacggcggataagaaggatttgcttgtgcaggtaaacggacggctttctatcgaatcagttgccgatgctgacttattgaaaaagatgctgaaagagactttgacatggagtccttacgagcggattaaattgaaaaaggttcaaaacggagccggacaggatttttataaatcttacggcatatccgctgagatgtccgtacataaacagacaaaccgggcgtatttttcttatagcgacagtctgggacaagagtatctgatcccgtctgaacaaacctattattcagtatatcaggctattgacgggatgaagacaacagacggaggctcacagaccgcgagcattatagaagccgatgcgattgcatcggtatcggaaagggaagacggcgagcagctgcggattcaattgtccgaaaaacataaggttgaagattcgctggaagggattttaatgatcgaagggcttctgttaactgcgaaggaattcggttattctgaggtgctgttcacacatgcgcatacaaagaaaatcggtaattatgatgtgacaaaacctatcgctgtgcctgccgcgcctaatccgcttccaagccattaaacgtaaaaaaacccaaaacttatgaatgttttgggttttttgttggttacggaagatcaatcagtttaacggaaacaatatcctgaattgaagtcagctcattgacgactttatcatctaaatgtttatcaaaagaaagcatcataatggcttctccgcctttttctttacggcctacctgcatggtagcgatattgatatcgttatcgccgaggatgcgtcctacgcgtccgattacaccggtcgtatcctggtgctggatataaacgaggtggccggcaggatttaagtcaatattaaagccgttcagttcaacgattcgttcaccgaagtgagggatatacgtagccgttaacgtaaatgtgctccggtctccggttacttttacgctgatgcagttatcatatcctgattcattggaggaaatcttctcgctgaagctgattccgcgttcttttgctacaccgccggcgttcacttcattgaccgttgagtctacacgcggttttaagaaaccggacagcaggctttttgtaataaatgatgtttcaagtttggcgatggtgccttcatattgaatcgcaacatctttgacgggttccttcatacattgtgacacgagacttccgattttatcggcaatttggtgataaggctggatttttttgaattcatctttcgtcatcgcaggcaggttgatcgctgacatgacaggcagaccttttgcaaactgcagcacttcttcagaaacctgtgccgcgacattcagctgtgcttctttcgttgaagcgcctaagtgaggtgtggcgatcaccagcggatggtcgggaagctttgattcaactggcggttccacttcaaatacgtcaagggcagcgcctgcgacatggccgctttccagcgcttccaaaagcgccgcttcatcaataatgccgcctcttgcgcagttgataagacggacgccttttttcgttttggcaatggtttctctgttaagcagtccttttgtttcctttgttaaaggcgtgtggacggtaatgatatccgcgctttcaagcacttcttcgaatgtccggctgtttacgccgattttgccggctctctcttcggttaagaaaggatcgaatacatgaaccgtcataccgaacgctctggcgcgctgggcaatctcgcttccgatccggcccagaccgacaatgcctaaagtctttccgtagagctccgccccgacaaaagccgtccggttccattctcttgattttactgagatattggcttgcggaatgtgtctcattaatgaagaaatcatcgcgaatgtatgctctgccgttgaaatggtgtttccattcggcgcgtttatcacgataactccatgttttgtggcctcatcgatgtcgatgttgtctacgccgacaccggctctgccgacgatttttaaagaagtcatttttttaaacaattcttcggttactttcgtggcactgcggactaacagggcatcaaaggtatgtaattcatcttctgcatccgcgacgtttttttgaacaatttctataaagtctgattccatcagcggctttaagccgtcattgctcatcttatctgagaccaaaactcgaaacattgttagatttcctcctagtttagctgactaaatatctgataatttatcatattctcaatagagtgtcaatgtgtattgacgcagtaaaggagaaaaggaaaccgctgaatcagcttaaattgggcttccccaatattttatttaaatttgagcagttctctatacaattgcaacttgatcatatataatgtgaataaattcataagatcaatcttcggggcagggtgaaattccctaccggcggtgatgagcatcacgctctaagcccgcgagctgcttcggcggcaggatccggtgagattccggagccgacagtatagtctggatgggagaagatggaggttcagcagacgttttgatgcttatatcaaacgtttctttgccaagccttagtaagctcccgctttttaacaaaagcggtttttttattggggcgcaaaagaacctttcctcttttcgagagatttgatcgaaaaggagagagcattgtgaaagtaaaaaaattagttgtcatcagtatgcttagcagtattgcttttgtgcttatgctgttaaatttcccgtttccggggctgccggattacttgaaaattgatttcagtgacgttcctgcaattatcgccattttggtttacgggcctgcggcggggattgcggttgaagcgattaaaaatattctgcagtatatcattcaaggaagcatggccggcgtgcctgtcgggcaggcagccaattttatcgcgggaacgctgtttattctgccgacggcgtttatgtttaaaaagctcaattcgacaaaagggcttgcagtgagcctgctggccggaaccgcggcgatgaccgtattgatgagcattttgaactatattcttatcctgcccgcgtatacttggtttttacattcaccggcactgtcaaacagccagttaaaaacggcggttgtcgcaggaatcctgccgtttaacattgtaaaaggcgttatcatcaccatcgtctttacgttcatctttacgaagctgaaaccttggattgaacaaaaacgcagcatccagacacaataaccactccaaagcgcccgctctgtaaaacacagaccgggcgcttttttgattgtttgatcacgcaaaaaaaataagactccggccgataacagccggagtcttattcaggacgaaaaagctcctctcacggggagggcttttttattcgtatttcagcgggtcgccttcgaatggttcatccgcaactttgattgaatcagtagggcatccttcaaatgcgtcaatcatatcttcttccagaacttccggaacttcgacgacgcctttattttcgtcaagcgtaacgaacgcaatgccttcatcatcataatcataaatgtctggtgccgcagctccgcaggcgccgcatgcaatacacgtatctttatctacaattgtgtactttgccatgaataaaacctcccagattgttcgtgttggaacaaatggtttaccttatatatttttaaatataacacctattcctcttacttattgtaatgatgttagtgtcaaatttcaacagaaaaatgattgagaatgcttatcacataagggattctctttagcacttccccctaaaagatgactttaaacgtcaaatttatatgaaaatctgttaaaataaaaagaaccaaaaaacgaaacttgtcacagaagaaatgtaggtgtgtttagattggcgataaactactttgataccgtggttctcgactgtctggacaaaatagacggcgaacggactccgagtgctgtgtttcatttattaaaaggaaaaaagtcgtctcaaaccattcaggatgccggcttatttcagatcgctaaatatttcggcatggcttcacattgtgaacgcggcgatattgcggcttctttgcataaactcaccgagaactcatacattacagccggaaaagaagagggaacgtggaaagtgactgcgcgcggcgttcaaaagcttgaacgggcgtttgccgagcggccttggccgaagcactgccacggcgcgaattatcaaacgcctgctgttaccctgtggaggcggctttccctgctcattcaagtcctgtcaaacaaagagcatcaatgtaatcaatatatcccggttaccaacgatgtgcagacgctgagatgggtcaaacggttcatacggaaaaacatagacgctaaagagctctccgtccaaatgcatgagacgctgtttcaccttctgcaaggcgtaagtgaacggcaggcgcttatttttgtctattctttaacttcattcaacagaatcggcaaaacgaataagcagctggctctccagctgaacgaagatgaatggtatgtgtccgtccagttttggggagcggtacattatgttattcaatcgcttccgcaatgtgcatatcccgctctgcgcgagctgttgtccgatctgcaggcggaaagcgcgctgacacagtctgccagaaaaacctttgagctgttggaaaaagggtttccgattgaacggatcgccgcggtcagaaatttaaaaaccgccacaatcgaagatcatatcgtagaaatatcattgcatcagcctgcattttttacagaacagtatctttctgaagaggaacagcgtatgataacggcatttgcaaaacagcatcaaacgaataaaattaaacggattcgcgaaggaatgcagatgcgcttcagctattttcagatcaggctggcgctggcaaagacggtgaatcagcatgactgagctgcataaagctttatccaggtattttggtttgcattcctttaaaaaagggcaggaagagattatgactagcgtgctccaaaaaaaagatacgatcgccatgcttccgaccggcgggggaaaatcattatgctatcagctcccgggttacatgatggacgggctggtgctgattatttcgccgctcctttcattaatggaagatcaggtgcagcagctgaaagcgaaaggagaaaagcgggttgctgcattaaacagcatgctgaattccgcagagcggcattttatcctcagcaacatcagccggtataaatttctctatatgtctcctgaagccctttcttcaccttatgtgctgaaccgtttgaaaaatgtcccggtcagtttatttgttattgatgaggctcattgcatatcagaatggggacatgatttcaggcctgattactcgaagctcgggcctttcaggcaggcactcggaaagccgcctgtattggcgctgaccgcaacagcgacaaaagaaacgctcagagacgtgacggatgtgctcggacttgagcatgcggtgcgtcatctttattcagtcaaccggccgaacattctcctggcggcagaacatttggctgataataccgaaaaaataagcaggctcacggagcttgccgaaaagcttgaaggcccgggtatcatatattgtccgaccagaaaatgggcggaagagcttgcggctgagctgaacgaaaaaacgggaaagcggacggattattatcacggcggaatggatacaggcgacaggattttaatccagcagcaatttatccataaccagcttgattgcatctgctgcaccaatgcgttcggcatgggtgtggataagtcagatatccgctttgtcattcacttttatcctccccaaacggccgaggcctttatgcaggaaatcggcagagcgggacgcgacggcagcccgagtgtcagtattttgctgagggcgcccggcgataccgagcttcagcagcagattattcagacagaaagcctgtctgattatgacctggaaggcattctggccgtcatacgggatgccggtacgagtgatgaacgaaagcttcgggacgttctgatcaataagggcgtccaggaaacacaggcgcgaacggccgtccatctgtttctgcaaggaaaaaccacaaaagaccagctgcaggaagaactgacataccgcgtggaaaagaagctgcgtaaaatgaatcgtttttcggcgttattagagcggaaagaatgtataagagaagcgctgctgtcttattttgatgaaccgtatgagcctgatggtcaaaccggacaatgctgcagcagctgcggacttgatctggctccgtacgagcaaaaaggagaacgtaaaaatatggaacggtttgaagattggaagctggaattaggccggattttcggatcagagtctgcgggtgagttcagctgagacggcaaagcgaattgatccggcagctctcagaccgggagattgtgatgcagctgtatgccacccaattgctcatattggcggtttcagctgttatcggctttttcttttttaccgacattcacgattttttaaagctgtggcatatacgtgacgataatatcatatggtacggtgtaactcttgccgtccttgtcatttttgccgatctggcggtgatgaaatggtgtccttcgcatttatatgatgacggcggcattaatgtattgctttttaagaacaggccggtgctgcacattttgtttttgacgctcctcatttcgttcagcgaagagattttgttcagaggcgttctgcagacacatatcggcttatgggccgccagcttcatttttaccgtgcttcatttcagatacttggcgaagtggcttctgtttatgatggttgcgggtatcagtcttttgctggggcttatctatgaatggaccggcaatttattcgttccggttacagcgcattttattattgatgcggtatttgcctgtcagatccgttttcaatatgttaggaggggtttgcatgacggaaatgtcaagagttgaaagaagaaaagctcagctgcgtgccgagcagcaggttgccgcggccgcggatgaacaaattgaatatcttgaagacagcctcccgacaagacaatctgtaaaagaggagcgtaaaaaaaaggaagagcaggtgaaggaaaaaaccaaaacaaaaacgccgctgttcacttttctgaccgtcctgttcattatcgtaacaatcggtgtctttttcggtcttctttatatgacgaacagcagcagatttgacccgaaggactatgaagatgtcttcatagaccacagtgaaagcgcgcctgccgttattccgaaaggcgctcagaaaaaaacgtcagaaaccgctcttttagaacaaccgaaaaaaaagtctgacgacaaagataagaaagaagcggctgcacctgaaaaaacgaaagaaaaaccaagtgaaaaaccaagtgaaaaaacacctaaaaaaacggaaacgccctcagaaaaacaagtaaagccgacagacaccgaatacgcggagacaaaacagcagtctccgccggctgtccgtgaaaaagcggctccggctgaggcgagtgatcaagccgggactgtcccaaaaaaagtgcggaccgtacagcatactgtacagccgaaagaaacgctttaccgtatttcaatgaaatactataaaagccgggcgggcgaagaaaaaatccgcagctacaacggattaaacggaaacgacgtgtacaccggccaggttctgaacattccgctgtctgattaaaataaatgcatgttttcaccgcgtttttcatatagtgtaccaatgaaaacggacaaggtgtgaagcgcatggattctttatggaagcaattagaccgatttgctgacggaccgacgaaacagatgcttcaggcgctggtgaaacggaaattaaaatacgaaaattatgccgcacaatgccgaagatggcagtgggcgtccctcgtttgtttttccctgatgtgcatactgctgatgtttaaaagctttaatgccccccaagcctctccgcagctgattctgcaggaaatattaggccatacggtttacttgtgctggattatggcttccgcttttgcgtattgcacttcttattattttaaaaaaaaggaagaaaaagctgagggtgaatttcataaactgagatgtgaaattatccaaaaaagcacggatttatggccccagcctgaaaaatggagggcgagagaatctgtttttcacttgatgaaacatcggtatgatatcaatctttattttgaaagcaaataaaatgaggcgttttccggaaaggatagaaacgtctttttttgtttgtccgtctaatataagacaatgacagaatggagagtgcgtttatgaagcttacagcgggaattctcggctcattggcgggagcggctgcggttatggcggccgttatgtacaaaacggcaaacggcagccatctgaaaacacatacatttacgcttgataaaatgaaggggatgaagccgctcaccatcttttttatatctgacgtgcaccgccgtttaattgatgaaaagcttctccgcgaagcggcaggttataagccggatgccgttttgctcggcggtgatttggcggagggcggagttccttacgccagaattgaagaaaacatcaaacgtctgacggctctcgcgcctgtcatgtatgtgtggggaaataacgattacgaggtcagccagcaaaaactgctctctcttttacgggcatacaaagtgatcccgctgagaaatgaatcggttcagtttacttataaaggggaaaccgttacgatctgcggcgtggatgatatcaggatgatgatggatgattatgattctgcaatcagatatacggatgctgacaaagtaaacctcctgctttgccataaccccgacatccatgagcagatgagggagtcagacgggattgacgctgtgttcagcggccatacgcatggcggccaaatccgtttcggacggttcgggccgtacgaattgggcgggacgggaacggtaaaaaaagcgcattacctgatcagcaacggctacgggacgacaaaagttccgctgaggctcggggcgaaaccggagacgcatatgattacgctgtgcggaccggatgagccgtcttcctgaaacaaacccggccgaggtgataaaaaacggcattctgcttgtcttcccgctgtacacggtgtaaactgataacaaattaagaacctatgattcatttattcatatactgtgttatatgatttgtgtgcaagaagaggcaggagggaacattatgcggcttgagcgtctgaactataataagattaaaatctttttaaccctcgacgatctgactgatcggggactgacaaaagaagacctctggaaggactcgtttaaagtccaccagttatttaaagatatgatgaatgaagcaaatacagagctcggctttgaagcgaatggtccgatcgcggtggaagtatattctcttcaggcacaaggcatggttgtgattgtaacgaaaaatcatgacgcggacgcagaagatgacgaatatgacgatgattatatcgagatgcaggtcaaacttgacgaaagcccggatattatttatcagttccattcgtttgaagatatcattcagcttgccggaagccttcaccgaatcgggattaccggcggcaccgtctaccactatgagaaccaatactatgtaagccttgaagacctcggctcccgttccgccgaaggcgtcatcgcggtgctggctgaatacggacacccggcgacgattacgatttacaggctccatgagtacggaaaactcatcatggacggcaatgctgtggagaccatccagaaacatttttcataaaaaagatttgaaacggcagctgttttcagcggccgtctttttttaagcgaaataatggaaaaatcattgtctttcttctatgcacggagatattgaaggtgtatactagtcactgaaagggagcatgagagaaacagaagattttaggaggttaactcaaatggcagccgatcgattcaccggtcataatgaagaagacaaacatgatgtattaaaatcaacccaaaccgtaatacataaagctctggaaaaattggggtatccagaagaagtgtatgaactgctgaaagagccgctcagattattaacggttaaaattcctgttcggatggatgacgggtctgtgaaaatatttacaggctatcgtgcgcagcacaatgactccgtaggtccgacaaaaggcggcattcgttttcacccgaatgtaactgaaaaagaggtgaaagcactttccatctggatgagtttaaaatgcggaattattgatcttccttatggcggtggtaaaggcggaattgtttgtgatccgagaaatatgtcattcagagagcttgaaaggctgagcaggggatatgtcagagcaatcagtcagattgtcggaccgactaaagacgtcccggcacctgacgtatttacaaactcgcagattatggcttggatgatggatgaatattcaagaattgatgaatttaactcacccggctttattacgggaaaaccgcttgtactcggcgggtcccacggcagggaatcagctacggcaaaaggcgtcaccatctgcataaaagaagcggccaagaaaaaaggtctcgatattcagaacgcgcgcgtcgtcgtacaaggtttcggaaatgcgggcagctatctggccaagtttatgcatgacgccggcgcgaaagttgtcggaatttctgacgcgtacggaggcctttacgatccggacggtcttgatattgattatctgcttgaccgcagagacagcttcggaacggtgacgaagcttttcaatgacaccattacgaatcaggagctgcttgagctggactgtgatatacttgtcccggcggcgatcgaaaaccaaattacagaagaaaatgctgaccgcatcaaagcgaaaatcgttgtagaagcggcaaacggaccgacgacactggaaggaacgaaaatcctgacagacaaaggaacgctgctggttcccgatgttctggcgagcgccggcggtgtaacggtttcttattttgaatgggttcaaaacaaccaaggcttctactggagtgaagaagaagtcgaggaaaaactggaaaatatgatgataaaatcgtttaataatatttatgaaatgtcccaaaaccgccggattgacatgaggcttgcggcttacatggtcggcgtgcggaaaatggcggaggcttcgcgtttcagaggctggatataaaccaatcgtttgcataaacaaaaaaaatctcctatgataatataggagattttttatatgagtggaaacttatgatggaaatgccaatcgcaggagttgaaggacatgacagaagaaaaagcaattataataggcggaggtccttgcggattatcggcggctatacatctgaagcaaattggcgtgaacgcgcttgtaatcgaaaaagggaatgtcgtaaacagcatttataactatccgacccaccaaacttttttcagttcaagtgaaaaattggagatcggcgatgtcgcctttattacggaaaacagaaaaccggtccgaatacaggctctctcttactacagagaggttgtcagaagaaaagagctgcgcgtaaacgcctttgaaacggtggaacgcgtaacgaaacaggaagacggccgttttcttgtagaaacatcaaaagaccgctacctcactccgttttgtatcattgcgacaggatattatgatcatccgaattatatgaacataccgggtgaagggcttcctaaggtatttcattactttaaagaaggccatccttattttgataaagatgttgctgtgatcggcgggaaaaactcaagtgtggacgcggctttggaactggtgaagtccggtgcgcgcgtcacggtgctctacagaggacatgagtactccccgagcatcaagccgtggattctgcctgagtttgaggccctcgtcagaaacggcacaatccggatggaattcggcgcttgtcttgaagaagtgacggaagatgaaatcattttccgctccagccgaaatgagacggtccggctgaaaaacgatttcgtatttgccatgacgggataccatcccgatcacggtttcctcgaaaaaatcggtgtgcggattgatgcggaatcaggccggccgtttttccgggaagaaacgatggaaacaaatgttgacggtgtttttatcgccggagtcattgcggctggaaataacgccaacgaaatttttatcgagaacggccgttttcacggcggcttgatcgcaaatgaaatatcaaaacggctgggtgcagagagcatatgatcattcatatgctcttttttaaaaaaattgaaagatgtaaaaatgtgaacaacatggtacgatagatataggaatataaaggaaagaggttgcctgatgtttgcaatcatctctgcaggaattgctcccggcattgcgctgttaagctatttttatttaaaagatcagtatgacaatgaacccgtacatatggtgctgaggtctttttttctcggggttgtccttgtgtttccgaccatgtttatccaatatgttcttgaaaaagagcatgtggggggaggaagctttttcgtttcgtttttgtcttcgggatttctggaagaatcggtgaaatggttcgttctgatgatcagtgtgtatccgcatgctcattttgatgagcattatgacggaatcgtttacggggccagtgtgtctttaggatttgccacgcttgaaaatattctgtatttattcggccacggcgttgagcatgctttcatcagggcgcttctgccggtctcctgccatgcgctgatcggagtgattatgggattttatctcggaaaagcccgcttttcgcagaaaaaagcccgtgtcaaatggcttgtgatttcgctggccgtgccttcatgtctgcacggttcttacgattttattcttaccgccctcaatcattgggtatattatatgctgccgtttatgctgtttttatggtggttcgggctgcgaaaggcaaaaaaagcacgctccgtcaatatgatccaagtgtgaagaaaccgcgcgtcgcgtgcggtttcttttttatgccttgacaggggataagaaggaaacgtgcataaaaataacctcgtgacagacaatacgggtacactttaaattttgcagtaggaggcttgaagagatgaagtgcaaaggagcctttatggcatgtctcattctattttctttcgccgccgctttcttcgatcatcatgaaacggttcatgcgttttcaaatcaagtgattcaaagaggcgcgacgggtgatgatgttatagaattgcaggcccgtcttcaatataacggattttataacgggaaaatcgatggtgtttacggctggaccacatactgggccgtgagaaattttcaggagaaattcggcatgaagccggttgacggcctcgtcggcgcgaaaaccaaacaggtgctgatttctaaatcaaaatattaccgtgaatatgtaatggagcagatccaaaaagggaatacgttcactcattatggcaacgtcccattggaaaaccaaacaaaaccgagagccggaacgcagaagccggcgggaacgaataagcctgctcaaaagccgcaaaacaatacaggcggtcagtcaaatcaaaagcaaaatacgacagcggccaatatgcctggcggtttctcaaacaacgacatcaatcttctggcacaggctgtgtacggggaagcgcgcggtgagccgtttgaagggcaggttgccatcgccgcggttattttaaaccgtattaaaagcccgttatttccgaatacggtggccggcgtcattttcgaaccgctcgcgtttaccgccgttgccgacggccaaatatacatgcagccgaatgaaagagcaaaagaagcggttcttgatgcgatcaacggctgggatccttctgaaaacgcgatttattatttcaatcctgatacggcgacaagcaaatggatttggggacgtccgcaaataaaaagaatcggaaaacacattttctgtgagtaaaagtacgcaaaatgaggtgttaacatgattagaggaatcattatcgctgttctcggtgtcgcgatcgccgcaaccggatactggggatataaagagcatcaggaaaaagatgcggtccttctgcatgcggaaaataattatcagagggcttttcatgaattgacgtaccatgtagatcagcttcacgacaaaatcgggacgacgcttgcgatgaacagtaaaaaatctctgtctccggcgctcattgatgtatggagaataacatctgaagctcataacaatgtgagccagctgcccctgactctcatgccttttaataagacggaggagtttttatccaacataggagatttcagctataaaacatccgtccgggatttagaccaaaaaccgcttgataagaaagaatatacaacactgaacagcctgtacaaacaggcggagaacattcaaaaccagctccgcagcgttcagcatctcgtcatgagcaaaaatttacggtggatggatgttgagatggcgctcgcctctgacaaaaaacaaagcgataatacgatcgtcgacagctttaaaacagtcgaaaaaaatgtaggcgctttttctgaagacagcatcagccccacatttacgggagcaaatacagaacgaaaaggttttacgcacctgaaaggaaaacaaattacggaaaaagaagcggtcaaaatcgcgcaacggtttgcgcctgatcataattattcaattaaagtggtcaaaagcggcaggaaaacgaatcgggacgtatacagcatccgcatgaaagacgcggacaacaagtcttttatctatatggatattacccaaaaaggcggacatccggtctatttgattcaaaaacgggccgtgaagaaacaaaagatcagcctcaatgaagcatctaaccgggccgtcgcgtttttaaagaaaaatggatatgaaacaaaaggcctcgaaattgatgaaagcgcgcaatataataacatcggcgtcttttcttttatccccgtggagaaaaacgtccgcatttatccggaagccatccgaatgaaagtggcgctggatgatggtgaagtcgtcggtttttccgcacgtgattacctggcggcgcaccgcacgagaacgattccggctcccgctctgtcagctgatgaagcgaaagcgaagctgaataaaaatgttgaagtgcgggagacgcggcaggcgctgatcacgaatgagctcggtcaggaagtgctttgctacgaaatgctcgggacgatcgggaaagacacatatcaaatgttcattaatgcggacgacggaaaagaggaaaaaatagaaaagttaaaaagtgcagaacctatatacaaagacctataaaaataaaggaggaaaggactaaaagtcttttcctttttttcgttacatgctttaataaaagcataaataatgaaagagtgaaggcccatgatagctgtcggagattatatttggattgaatacatagagaacaatgagcccaaaaaagcgaggagcaaagcagtaagcgttgaaaacggcgaactgcacatctcatatcccgtcgatctggattcgggacggacggtctttttgcataaaggattggaaataacagcggaatttatgggggatggccaagtgccgtatcaatttaaaagcataatcaaaggaaagaaaaaagaccccatcccgatgatcggattggacatcccccctcaggaggaaatgaagcggattcaaagacgccgatacgtccgtgcagacgcagtattggatgtatccgtcaaaatggaagcgaaaaaaaccgctttccaaacggtttcctctaatatcagcgccggcggaatcgctgttgtgatgcctgagcatatttccgcggaaccaggtgaaaagctttatgtctcattttctcttcccggcaaggaaaatacagccgatattacggccgaggctgttacccagcggattttttatgatgaaaaggcggataaacaaaaaatgacgcttgaatttgcagagatcgatcccgcatcacagcagcttttactccaatattgtatgcgcgcgcagctgcagcagagaagaaacagtctgtcggaataaacagcagcgcacttttccatactaatcctaatggaggtgcgcgtgtatgaaaacgtttgaacgtctgctggtcaaattggtctgcattcagcttatcattttgggcgcggtgcagtttttgcttcattatcagcctattgaaccttatatttcgaaagctgtgaaatatgagggagttgataaaatggagaaaaaagaatggattgaaacggtaaagcggtaaatcagctcaattttttcgccccttttccggcagttcatgatacaatccatagaggagtaaagagcaaggagagagattatggacaagaaattatcaattgcgatcgacgggccggccgctgccggaaaaagcaccgttgctaaaatagtggctgagaaaaaatcatatgtgtacattgatacaggagcgatgtatcgtgccattacatatacggcgctcaagcagaatgccgatttaactgatgaagccgcgcttacagagctgctgaagcgtacggaaattgagcttgtatccgctccggaaggacaaatcgttctggtaaacggagaagatgtgacagaagaaatccgaaaagacgaagtcagcaaccaagtatcaatcgccgccaagcataaaggcgtcagagaagaaatggtcaaaagacagcagcagctcggacaaaaaggcggtgtcgtcatggacggccgtgatatcggtactcacgtgctgcctgacgccgaagtgaaaatttttctgctcgcgtccgtagaggaaagagcgaagcgccgatatgaagagaataagaaaaaaggctatgacgtgaattatgagacgctcattgaagaaattgccagacgcgacaaactcgattcagagagggaagtttccccgctgcgcaaagcggaagacgcgattgaaatcgatacgacgtcactcagcattgccgaagtcgcaggaaaaattctggagatcgtcgaacagaaatcacgttaacttcgggcggagcgctttataatttttttcgaaagacaagatgttattgcttgacaaaccagtccatttattagaagttaatactaataaaactttttattgatcattcaaaatcttttttggatgattctttaatacatattcggctgaaaagcggacattcacatgttcagctttcaaaccgtattaattaagctgtgtaggtttggaccaaggaggttattcaaatgacagaggaaatgaatcaaattgatgttcaagtgccagaggttggagatgtagtaaaagggattgtgacaaaggtagaggacaagcatgtagatgtcgaaattgtcaatgtcaaacagtccggaatcattccaatcagtgaattatcaagtcttcatgtagagaaagcatcggatgtcgtaaaagttgacgacgagcttgacctgaaagtaacaaaagtggaagacgatgctttgattttatctaaacgtgccgttgatgctgaccgcgcttgggaagaccttgaaaaaaaattcgacacaaaagaagtgtttgaagctgaagtgaaagatgtggtgaaaggcggtctcgtcgttgatatcggcgttcgcggcttcattcccgcatcacttgtcgaagctcatttcgtcgaggatttcactgactataaagggaaaaccctctctcttatcgtcgttgaactcgaccgtgataaaaaccgggtgattctgtcacaccgggctgtagtggaaaaagaacagacagccaaaaagcatgactttctccaaacgcttgaggttggaagcgtgcttgaagggaaagtgcagcgtctgactgatttcggcgcatttgtcgacatcggcggaattgacgggcttgttcatatttcgcagctgtctcattcacacgtcgaaaaaccgtctgacgtggtggaagaaggtcaggatgtaaaagtgaaagtactgtccgtagaccgcgataacgaacgtatttctttatctattaaagaaacgctgccgggaccttggagccagatcggcgaaaaggtaaaacagggagatgtgcttgaaggaaaagtgcagcgccttgtaagcttcggcgccttcgttgaaattcttccgggcgtggaaggacttgtgcacatttcgcaaatttccaataaacatatcggaacgccgcatgaagtgcttgaagaaggacagactgttaaagtgaaagtgcttgacgtcaacgaaagcgaagagcgcatttccttaagcatgcgtgagcttgaagaagcgccgaaagccgatcaggaggacttccgccaataccaggcgaaagaagagccgagcaccggcttccagcttggcgatttaatcggagacaagcttaataaattaaaataaattggtgataaaacgtgacacgagcagaacgaaaaagagaacatataaatcatgcgctgtctaccggccaaaaccgggaaacggggcttgatgatattacgtttgttcatgtcagcctaccgaacctagcattggaaaaagtggatatatcaacgaaaatcggcggactcacaagcagttcgccgatttttatcaatgcgatgacaggcggcggcggacagcttacatacgaaattaacagatcgctggcaagagccgcgcgcaaagccggcatgccgctggctgtcggttcgcaaatgtcagctttaaaagatccctccgaacggtgttcttacgagatcgtcagaaaagagaatccggacgggctgatatttgccaatttaggcagcgaggcggatgccgagcaggcgaaaagggcagttgatatgattcaagcagatgccctccagattcatttaaatgtgattcaggagatcgtcatgccagagggtgacagaagctttaccggcgctctcggccgcattgagcggattgcggcggaagcgggagtgcccgtttttgtcaaagaagtcggcttcggaatgagcagggaatcggcacggcagttatttgatgctggcgcagcagcagttgatgccggcggatacggcggtacgaatttctctaagattgaaaatatgcgcagagagaaggcgcttcatttttttaatacgtggggaatttccactgccgcaagcttagcggaaatccattcgctctccgctgatcaatcaattatcgcatccggcgggctgcaaagcgccctggatgtcgccaaatcgattgccctcggcgcttccagcgcgggaatggcgggcactttcctgaaagctctcacctctaaaggagaagagggcctgtttgacgagatgatggcgcttttgcaagagctgaaaatgattatgaccgtcctcggatgccaatcggttgcccaattgcaaaaggcgcctttggtcataaaaggtgacacacatcactggctttctgaacgggggattgacacgtcccgtttcagcagacgttaaaaggcatgcgaacccgcatgcctttttctgttttttacgattttctttttcggaattccccgttctgctcaaggcttgtcgctcctttatggtgaatcgaatcatcgcgatcagattccacccggcgggaggctttcagttttttctcctgtctgtcttttcccatccttatccgctcctttcaggcataattggtttaaaaaatgcgttcccgctccatactgatcagaggaggagcgattatggaaccgttttattattactggtcaatgtggtttttatggatacttgcgacttttatttttgccaaaacgaaaagccgtttttacgtatcagtctttattttgactaatatgatggcaagcatacatcagattacggcttattttacgctgaatgcggcatatgtcatgttttttgctgcggcatttgtttatgcgggaagcctcggcatgcataaacggctccgtaatattgtgattcatctgacggcgtctgcggcgtacggctttatttttctttttgcattatatgatcctgtttggtttatcataaaacctgaatgggcggcggttatactgcttaccgttattacgctttccgttgaggggcggttccctgagaggctttgtctttttgttctcggcatgtgccagggggagctattgtatgctgcggtcatccgcaacattgcgggtgcggcagccgtcggggattatcaatggctttcaggctgttcggcgggagtgattctcctcgtcgggctgactacatatgaacagcttgcggcgcgcatcagccaaaaaagcaaaaagcagggcaaaggagcgacaaaaatgtcttgaaaacagacggagactgttacatgaatgcgaaacattttgaagaatacattgtgatctcagtgaaaactgatataataaatgagttaagcccttctgtttgaagggttcttttcataacgaagatgatttttaataaccggttgaacaattttttgtgaaaatgtaagcggctggattgaaaggaagggtactatgggtaaacctgtcgtagccattgtcggaagaccgaatgtgggaaaatccacaatctttaaccggattgcgggtgaaagaatttcaatagtagaagatacccccggagtgacgcgggaccggatatacagttcggcggaatggctgaattatgattttaacctgattgatacgggcggaattgatatcggagacgaaccgtttctgacacagatccgccagcaggctgaaatcgccatggacgaggctgatgtgatcatctttatggtgaacggccgcgaaggtgtgacgtctgcggatgaagaagtggcaaaaatactgtaccggacgaaaaaaccggtcgtattagccgtaaataaattagataataccgaaatgagagcgaacatctatgacttttatgcgctcggctttggagaaccgtatccgatttcgggcacacacggtttaggattgggagatttgctcgatgcttgtgccgagcattttaaaaacattccggagacgaagtacagtgatgatgtcgttcaattctgcctgatcggccgcccgaatgtcggaaaatcatcccttgtcaatgcgatgctcggcgaagagcgggttatcgtgagcaacgtagccggaacgactagagacgctgtggatacggcgttcacctacaatcagcaggaatttgtaatcgttgacacggcgggaatgagaaaaaagggtaaagtatatgaaacaacagaaaaatacagtgtgcttcgggcgttaaaagccattgaccgctcagacgtcgtcggcgttgtgctgaatgcagaagaaggcatccttgagcaggacaagcggatcgccggatacgcccatgaagccgggaaagccgtcgttattatcgtaaacaaatgggatgccgttgataaagacgagcgcacgatgaaagaatttgaacagaatattcgggaacatttccaatttctcgattacgcgccggtgctgtttatgtcggcactgacgacaaagcggattcatacactcatgcctgcgattattaaagcgagtgaaaaccactctctccgcgtgcagacaaatgtcttaaatgatgtcattatggatgcggtcgccatgaatccgactccgacgcacaacggctcccgtctgaaaatttactatgcgactcaagtcgctgttaagccgccgagcttcgttgtttttgtcaacgatccggaactgatgcatttttcttatgaacgctttttagaaaaccgaatccgggacgctttcggatttgaaggtacgccaattaaaatatttgcaagagcaagaaaataaaaaggtgtgatacagagatgaaaaaagtggcaatgcttggagcgggaagctggggcactgcactttctttagtgctggctgataacggacatcaagtcatgatgtggggacaccgtgccgaattgatcgatcaaatcaacgaactgcatgaaaacaaagattacctgccgggggtggagctatcaagttctatcatcggtacagctgatttaagcgaggctttaaaaggagctgacttcatcattgtggcagttccgacaaaagccattcgggaagtgctgaaaaaggctctgccgtacatcccgaaacaatcgatttttgttcatgtcagcaagggaattgagccggattcgcttctccgcatttcagaattaatggaagaggagctgcctgaggagtacagaaaagacatcgtcgtgctttcagggccgagccacgctgaggaagtcggattaagacacccgacgactgttacatcatcttcaaaaaatatcaaggctgcagaagcggttcaggatttatttatgaaccagcatttccgcgtctataccaatccggatatgatcggtgtggaaatagggggagcgttaaagaatatcatcgctcttgcagcggggattacagacggattgggatacggagataatgcaaaagcggccctaatcacccgaggtcttgctgaaatcgccagactcggcacaaagatgggcggaaatccgctcaccttttccggcctgaccggcgtaggcgatttaatcgtgacgtgtacaagcgttcattcccgaaactggcgcgccggcaacctgctcggcaaaggatataagctggaagctgtcctggataagatggggatggttgttgaaggcgtgcggacgacgaaagctgcgtatcagctgtctcaaaaataccaagtgaaaatgccgatcacagaggcgcttcaccaagtattatttaacgggcagaaggtagaaacggccgtagaatccttaatggccagagtgaaaacccatgagatggaagacttggtcaacacattcgaaaatcgggtgaagtgacaataacatgccgtcagcatattctgaagtgacgaaagtccaaaacgcagaactctccggctgaaatcgcttaaaacatttgctgatttaggcagaagaggatgcagacgtatgcatctgcgcatactatagcatcgaagtccaagagagtgtatctcagacgtacaggtgaatatagtcaacttgactgaagcaaagtccccctctttgcttcagttttttttgttttttcaatagatggaaaacctgttgatcttttcaacatttgtatattaaaatgaaatataacgcttacaatgatgggacggggggcacgaacatgagtgtggcattaatgaaaatgtggtttgcgcttggtgctatgggattaatgtttgttgcggtggcctctatttatgtcagcaggtacaaagtgaaaaacaaactgataaaagcagcggtttcttcactcgcttatgcctgcatggtcatctcgggattgatcgtgttaatggtcgttttcagcgggcctgtcaatgaataaagcaaaaagggggcgcggaatgcataagttaaaaatggccgtcataacggcaatggcggtgcttctgctgtccggctgtctgtaccctgaagcaaaaaaaactgaaaataaagtatcttacaaacatcagcttcagcaggtgcaagcggcagtggatgaatttaaaaaggcgaacggcggacttctgccgattcagacaaaagatatgaaaacaccgctctatcaaaaatatccgatagattttaagcggctcgcgcccagatacatagaggagccgccggcctcagcttatgaaagcggaggaatgtaccaatacgtgcttgtcgatgtggaaaataagccgaccgtcaagctggtcgatctccaaatggcagaagcaatccgcgacatgaagctgcgtgtcaaaatgtatcaggaaaagcatacatatcctccttatgaggacgccgtttcacaagggctgttcactttaaataaaaaaaagctcggcatgaaagactctccttcagtcaaaagtccggtttcaggcacgtctctgccgcttttaatcggcgctgacggagaaatctatgccgactatcgcgtcgatctcgcccgctgcctgaaggaaaacaaaaagaaaatcaaaccgggcgcggaaattcaagatattttatggaaagagactcctttcgtcccggccttttcagtcacatacaccgtaaatgaaaaacaggaacccgtttttttagaaagtcagacgaaacaggaatgaacctttttcccgcgcatacaaatagggagaaaggtttttttgattttgatagaaaagactgcctgaaaattttctaaagatgtcatattgaaataggacaacgtcatacacatatagtgtcctgtatttgattggagaatggtgaatgaaaaatgataaggataggaagtccgggaggggatcacttggaaaaggtcgatattttcaaggatatcgctgaacgaacagggggcgatatatacttaggagtcgttggcgctgtccgtacagggaaatctacattcattaaaaaatttatggagctcgtggtgctcccgaatatcagcaatgaggccgaccgagcgcgggcgcaggatgagcttccgcaaagcgcagcaggaaaaacgataatgaccacagaaccaaaatttgtcccgaatcaagccatgtccgttcatgtcgcggaaggacttgatgtcaacatccgtcttgtggattgtgtgggatatacggttcccggggcgaagggatatgaggatgaaaacggcccgagaatgatcaatacaccttggtacgaagaaccgattccctttcatgaggcagcggaaatcggtacgagaaaagtcatccaggaacactccacaatcggggtcgtcattacgacagacggctcaatcggcgatattgcgcggggcgattacgtggaagcggaagaaagagtcatcgacgagctgaaggaagtcggcaaaccgtttattatggttatcaactcggtaaaaccgtaccacccggaaacagaagcgctcagagctgaattaagcgcgaaatatgatattcccgtcctcgccatgagtgttgaaagcatgcgggaaacagatgtgttaagcgtcctcagagaagcgctttacgagttccctgtgctggaagtcaatgtcaaccttccgagctgggtcatggtgctgaaagaaaatcactggctcagagagagctaccaggaatcagtgaaagaaaccgtaaaagatattaaacgcctgcgcgatgtcgaccgggttgtcggccacttcagtgaatttgagtttattgaaagcgccggattggccggaatcgaacttggccagggtgtcgcagaaattgatttgtatgcgccggatcatttatatgaccagattttaaaagaagtggtcggcgttgaaatccgcgggaaagaccacctgcttgaattaatgcaggacttcgcccacgcgaaaaaagaatatgatcaggtatcagatgcgctgaaaatggtgaaacagaccggctacggcattgccgccccggccttagccgatatgagccttgatgaaccggaaatcatcagacagggatcaagattcggagtaaggctcaaagcggtcgctccgtccattcatatgatcaaagtggatgtggaaagtgaattcgcgccgatcatcgggacggaaaaacaaagtgaagaacttgtccgttacttaatgcaggactttgaagatgatccgctttctatctggaactccgatattttcggcagatcattgagctctatcgtaagagaaggaatctccgcaaaactgtcactcatgccggaaaatgcgagatataaattgaaagaaacgctggagagaattattaacgaaggctcaggcggcctgatcgccattattttgtaagctgaaggacctcttcctgaaacggggggtctttttttattctttttagatactggaaatcaatcaaggattaggaggaaaaaagcaaaaaaaggaatatttgttcggtaaaacacgtgaaaaccttgacgagcaagggattgaggctttaaaatgcttgatatggctttttatatgtgttactctacatacagaaaatcttcactttgttggacaaacattcctcaaagtgtctgttttcttttgaaaagccgtttacttgtctgttcttccctgctttgattttttatcagacaggtttagaatcaggctgaactgtgaagaaatgataataaactgctgatttgatacccttttgggaggaggtgaaaggcatgaacaagacagaactaatcaatgcggttgctgaagcaagcgaattgtctaaaaaagacgctacaaaagcagttgattctgtttttgatacgattttagatgcacttaaaaacggtgataaaatccaactgatcggtttcggtaactttgaggtgcgcgagcgctctgcacgtaaaggacgtaacccgcaaactggtgaagaaatcgaaatccctgcaagcaaggtacctgctttcaaaccaggtaaagctcttaaagacgctgttgcaggaaaataattgtgaatatagatcgtgtatgcatctgatacatacactttgtttcttcacagaaaagccccttgataaaggggcttttcatatttaagcagcctcggtcaccgggcaggactttcgttttgcttttggcgcggcaaatgtgctagaatcgaaattaaatgtattcaatggtggaggacacagacaatgaaagaagttaataaagaacagattgaacaggcggttcgccagattttagaggcgattggagaagacccggaccgggaagggcttttagatacgccgaaacgcgtggcgaaaatgtacgcggaagtattctcgggattaaatgaagacccgaaagaacactttaaaaccgttttcggagaagaccatgaggagcttgttcttgtaaaagatatcgcgtttcattccatgtgtgaacatcaccttgttcctttttacggaaaagcgcatattgcctacattccgcgcggcggcaaagtgacgggcctgagtaaattggcgcgggcggtggaagccgtctcaaaacgcccgcagctgcaggagcgcatcacttcaacgattgcagaaagcatcgtagagaccttagatccccacggcgtcatggttgtcgtcgaggctgagcatatgtgcatgacaatgaggggcgtaagaaagccaggtgcaaaaacagtgacttccgctgtaagaggtatttttaaagatgacgcagcggcgcgttccgaagtgttagaacatattaaacgtgcggattaataatgatagagggtgcagatatgaattcaaagcattcaagtgattttgtcgtcattaaagcggtcgaggacggcgtgaacgtcatcggtttaacgagaggaacggatacgaaatttcaccattccgaaaaactggacaaaggcgaagtgattatcgctcagtttactgagcatacctctgccatcaaagtgagaggcaacgccctcatccagaccgcttacggagaaatgaacagcgaaaaaaaataagccggctgtttcccgcttttgccaaatgcccgcaaacggcgggagaatacagccaatttcttttttttatgctataatgatacctgcgaataataatgacgagtaaatctcatacatattagaataaatgtgaatttggggacaagggtgatatttttgcaagacatctacggaactttagcgaatctaaatacgaaattaaaacaaaagctgtctcatccttatttagcgaaacatatttctgcgcctaaaatcgatgaggataagcttcttctttttcacgctttgtttgaagaggcggacattaagaacaacgacagagaaaattacatagtaactgcgatgcttgtccaaagcgcccttgatacccacgatgaagtgacaacagccagagcgttaaagcgagacgaaaataaaaaccggcagctcaccgtgcttgccggcgactatttcagcggactgtattattcgcttttatctgaaatgaaggatatctatatgattcggacgctcgctacggcaattaaagaaatcaatgagcataaaatccgtctgtacgatcggtctgttaatgacttgaatcaattgatcgaaagcatggcgattgtggaagcggccctgtttcacagagtgtcagaccactttaatcttccgcgctggaaagagctggcgagtgatttttttgtatataagcggctgatgaacggcaatgctatatttctcgatgtcatcggcaatattgtaaagtcagggaaatcaaaggctgacataatggaagatagcttccgaaaggcaaagcaaagcattgaaacgctgctgccgctcaattcaccaatccaaaacctcatgctgaaccggcttaaagcgatcagccaggacaaaacatatcatcagaaagtggaagaagggtaatcaacatgcaggagtcaaaagaacagcgcgtacacggcgtgtttgaaaaaatctataaaaattatgaccaaatgaactctgtcatcagttttcagcagcataaaaaatggcgcgataaaacgatgcagatcatgaatgtaaaagaaggcgcaaaagcgcttgatgtctgctgcggaacggctgactggacgattgccctcgcagaagcggccggaaaaagcggcgaaatcaaaggactggatttcagcaaaaatatgctgagcatcggtgagaaaaaagtgaaagagggcggttacagccaaattgagcttttgcacggaaatgcgatggagcttcctttcgctgatgattcttttgattttgtcaccatcggcttcgggctgcggaacgttcccgactatctgaccgtgctgaaagaaatgcggcgggtcgtcaaaccgggcgggcaggtcgtatgtctggaaacatcccagccggaaatgttcggattcagacaggcgtattttctttattttaaatacatcatgcctttcttcggaaaaatgtttgcgaagagctataaagaatattcttggcttcaagaatcggcaagagaatttcccggtatgaaagaacttgcgcgtctgtttgaagaagcgggcctgacgaatgtcaaataccattcgtttaccggcggagtggccgctacgcatatcggttggaaatgatgaatatacagatgtttgggtgaatgatatgaaatttaaaatggcctattcttttttaaatgacgatattgatgtgattgaaagggagcttgagcaaacggtgcggtcagactatcctttgctgagtgaagccgggcttcacctgctccaggcgggcggcaagcggatccgccctgttttcgtattgctttccggcatgtttggcgactatgacattaataaaataaaatatgttgcggtgacgctggaaatgattcatatggcgtccctcgtgcatgacgacgtcattgatgacgccgagctgcggaggggaaaaccgaccatcaaagccaagtgggacaaccgcatcgctatgtataccggtgattatatgcttgcgggctcacttgagatgatgacgagattggatgagccgaaagcccaccggatcttgtccaaaaccatcgtagaagtatgcctcggagaaattgaacagatcagagataaatacaatatggaacaaaacctcagaacctatttgcgccgcatcaaacggaaaacggctcttctcattgccgtcagctgccagctcggcgccatcgcttcgggagctgatgagaagattcacaaagcattatattggttcggttattacgtgggcatgtcctatcagattattgacgacattcttgatttcacttcaacggaagaggaactgggaaaaccggtcggaggggatctgctgcaaggaaatgtcactctgcccgttttgtacgcgctccgtcagcctgaattgaaaaatcagctgaaattaattaacagtgaaacaacacaggagcagctcgcccccattattgaaaatattaaacgcacagacgcgattgaaaaatcaatggccgtcagtgacaggtacttaaaaaaagcgtttgaaaaactgaatacactgccgagaggacgtgcgcgctcatcattggccgccatcgccaaatatatcggcaaacggaaattttaaattccttttacgaacaagatgtgaacattctccgccctggattgattaattgtcagaaagatgttacgatttcggtgtgcaacttgaaagcctatacataatgatggggtggagaatcttatggaaaaaacttttatcatggtaaaaccggacggcgtacagcgccagctaatcggagagattttatccagatttgagcgtaagggcttacaattggcaggagccaagctaatgcaagtttcagaacagatggctgaaaaccattatgctgaacataaagggaagccgtttttcagcgagcttgtggaattcattacatcaggacccgtatttgcaatggtatgggaaggggaaaatgtagtagagatcacaagacagctgatcggaaaaacgaacccgaaagatgcactgccgggcacgatccgcggtgactacggcatgtttgtcggcaaaaatatcattcacggttcagactccttagaaagcgctgagcgggaaattgacattttcttcaaacaggaagagcttgtaccgtatcaaaaattaatggccgactgggtgtactaagccgtcagcctttctttttctcttgttatgaaaaggtttacatattttaagaaagacagaggctgcgctgccctgtcttttcatttctcacaaatcagcctgcgggctgatttttttattgaaatcgtacaaattagaaagaaaacaggctatactaggacaaaagacagcgagattgggagagaagcaatggagccttacgacatttttatcaccaagtggaaacaaataaccggcgttgatttatctttatacaaagaagcacagatgaaaaggcggctgacgtccctttatgaaaagaaggggttcagggattttcaggaatttgccgccgctttggaaaaggacaagcttttattaaacgaaacattggacagaatgacgatcaatgtttctgaattttaccgaaattataaacggtgggaagttcttgaaacctcaattcttccgttaataaagcataaaaaaccgttaaaaatatggagtgcggcctgttcaacgggagaggagccctatactttggctatgattctcaatcagcagacgggactggccggatttgatatattggcgacagatattgatgaaaaggcgctaagcaaagccaagcggggcatctatcaggaacgctcgctgcaagaggtgccggcttccgtgaaaagccgttatttcactaagcaggctgacaacagttatcaagtaaaacaagagattcagaaaaacatccggtttaagcggcacaacctgcttgccgacagctatgaacaggattttgatctgatcgtctgccgcaacgtctttatttattttactgaaaaagcaaaagaagagctgtatgtgaaaatggcgggcagtctgaaaaagaacggaattctgtttgtcggcagtacagaacaaattttcagcccggaaaaattcggccttgagagcactgatacatttttttatcaaaaaagatagaagacatttaatgaaaacttgtggtatagttttacttaaaagcgttaatgcgatgaagggagaagaaagaaatgagatacttaacagccggagaatcacacggtccgcagctgacgacaattatagaaggtgtgcctgcggggctttatataactgaagaagacattaattttgagcttgccagacgtcaaaaagggcacggccgcggacgccgcatgcagattgaaacggacagagcgaagataacaagcggcgtgcggcatgcccggacactcggttcaccgatcgcgctcgttgtagaaaataaagactggacccactggacaaaaattatgggcgccgcaccgattacagaagaagaagaaagtgaaatgaaacgccagatttcaagaccgagaccggggcacgcagatttgaacggtgctattaagtataatcaccgtgatatgagaaatgtgttagaacgatcttccgcgcgtgagacaacggttcgcgtagctgccggagccgtcgctaaaaagattttagcggagcttggcattaaagtcgccgggcatgtcctgcaaatcggcagcgtaaaagcagagaaaaccgattacacatccattgaggatctcaaacgggtaacggaagaatcaccggtcagatgctacgatgaagaagcaggccgtcaaatgatggcagccattgatgaagcgaaggcaaacggcgactcgatcggcggaatcgttgaagtgatcgtcgaaggtatgccggtcggtgtcggaagctatgtccactatgaccgtaagctggacagcaagctcgctgctgccgttctgtcgattaacgcgtttaaaggcgtagagttcggcatcggttttgaagcggccggcaaaaacggcagtgaagttcatgatgaaatcgtatgggatgaagagaaaggctatacacgcgccacaaacaggctcggaggattagaaggcggtatgacgacgggaatgccgattgtcgtccgcggcgttatgaaaccgatccctactttgtacaagccgctgaaaagcgtcgacattgaaacgaaagaaccgtttacagcgagcattgaacgttcagacagctgcgcggttccggcagcaagtgtagtggctgaagcagcagtggcctgggaaatcgcaaatgcagtcgtcgaacaattcgggcttgaccagatcgaccgcattaaagaaaatgttgaaaacatgaaaaaactatcgagggaattctgatgaaagagcttgaggttcggacagcttcctccgcatatcccgtgtatatcggtgaaggcataaggaaacaggccgctgcccttttgtcttcactgaacaggccgctgacaaagatccttctcatcatcgatgctgaagttgaccggctttacggtgatgagatgttccggcttttaaacgaaacatggcccgtgaaaaaagtgatcgttccaagcggagaagaagcgaagtctctaaaagagtatgaacggattcaaacggaagcgatcgctttccatatggaccgctcctcatgtatgatcgccttcggaggcggcgtgacgggtgatttggccggcttttgcgcagcaacttttatgcgcggaattgatttcattcaaatgccgacgacactgcttgcccatgacagcgcggtcggcggcaaggtggccgtcaaccataaactcggaaagaacttaatcggcgcgttttatcagccgaaagcggtgatttacgatacggagctactgaaaaccctgccggaacaagagctgagatcgggcatggctgaagtgatcaaacacgcgtttatcgccgatcatgcttttttagaaaaacttctcacgtttgacacgttgcaaggactgacaagcgctgagctgaatgaaatgatttataaaggaatttcaatcaaatcggccgtcgtgcgtgaggacgaaaaggaagaggggataagagcttttctgaatttcggccatacgctcggccatgccgttgaggcggaatacggctacggacggattacacatggagatgcggtcgccctcggcatgcagtttgccctttacgtgagtgaacaggttgcgggttgcaagatgaacaggaaagaactcacacaatggctgattgggctcggctacccgggaagcatcagacaagatattgaaacgccggttctctccgcccggatgatgaatgataaaaaaacgcgcggaggcatgacacagttcatcgtgttaaaggaattaggcgaagcgcgggactgcatgctttcaaaagatgagctcgaaaatttgctgaacaaatggcgaatggaggaaacagcatgatgatacgcggcattcgcggagcaacaacggtggaacaagacaccgaacaagaaattttagaaaaaacacagcagctgcttgaaaaaatcattgaacaaaatggatgcaagccggaagacgttgtacagatcctgttatccgccacgcctgatatccattccgtatttccggcaaaagcggtccgccgcctttccgggtggcagtacgtcccggtgacgtgcatgcaggaaatggatgttaccggcgctctgcaaaagtgtatccgtgtcctgatgacggttcagacggatacgcctcaggatgaaatcaagcatgtctatttagaaaaagccgttgtgttaaggccggatttatcattgacaaaaaatactgacatgtaatacgataaacaaagcttagaaatacacaagagtgtgtatagagctggtaagtaagacattgaacagttgagtttagaatagggtagcagagaatgagtttagctgagctgagataaacacgtttttattctgcccaaaagaagcctttcttttgggtttatttcttatacgcaagactcctctcactcttcatctcattctccttaccgtaaggaggagaatcatgaatttacaatcggatgtttctttatttttaaaggacagtctgacacaccgcaccattccaatcgcagagacttttacggtcgacacgatcacacccattcagatggttgaaaaactggacagaaacattacgtatcttttagaaagcaaggatgagtcgtcaagctggtcgagatactcttttatcggccttgatccttttatcaccattaaagagagtcataacacattcactgccgctgatcccaacgggcatacgctgtttgaagccggagaattaaaagccgtgcttgactggatgaatgagagctttcgcattaaaacacccgagcttgatatcccattttcgggaggggcggtcggttatctgagctatgacatgattcctttgattgagccttccgtgccaagccacgcgaaagtaacagatttcgaaaaatgtatgctgtttgtctgccggaaaatcatcgcgtacgaccacgaaacgaaacaagtgcatttcattcaatatgcggcgcttaacggccgggagacggaggaagaaaagcgggccgtttttaaagaaaattgcgcggagcttcgtaagcttatcggtattttgacagaatcgaaagatatgaaagagccgtttttttctaaagaaacgtttgacacgccaagttttgccgctgtgacatccaattatacgaaagaagagtttatggccggcgtcaataaactgaaagaatatataaaagcgggagacatttttcaaggggtgctttcgcaaaagtttgacattccggtatccagacattcatttgagctgtacagggtgctccgcatcatcaatccttcaccctatatgtactatatcaaactgcctgacagagacattgtcgggagttcgcctgaacgtctgatccgcgtgcatgacaggcacctggaaattcatccgattgccggaacgagaagaagaggcaccggaacgaaagaagatgaacgcctgaaaaaagagctgatgaatgacgaaaaagaaaaagctgaacattacatgctcgtcgatcttgcgcgcaatgacatcggcagagttgcggagtacggttccgtagccgttccggaattcacaaaggtcgtttctttttcacatgtgatgcacatcatctctgttgtaaccggccgtttaaagcagggcgtccatcccgttgacgcgctgatgtcggcattcccggcaggaacactcacgggcgctccgaaaatccgcgcgatgcagcttttaaatgaattagaaccgacttccagagaaacctacggcggatgtatcgcttatatcggatttgacgggtcaattgattcgtgtattaccatccgcaccatgagtgtcaaaaacggtacggcgtcggtgcaggcgggtgcgggaatagtcgccgattccgtccctgaagccgaatatgaagaaagctgtaacaaagcgggggcgcttttaaaaacgattcaaattgcagaagacatcttttctggcggggaggagaagacggatgaacaaatttctgcaatcgtgcgttaatggccgtacgctgaaaaccggagaagccgaaaagctgatggagatgatgatgaacggggacatgtcgcagtctgagatcggcgggattttatcggtattagcccaccgaggtgaaacggcggaggagcttgccggatttgtaaaagtgatgcgggcgcgggcacagacatcaggtggcttggcggatgtcgttgatacgtgcggaacaggcggagacgggatttctacgtttaacatatccacggcagcggcgattacagcttctgccgccggagctaaagttgccaagcatggaaatcgctccgtttcgtctaaaagcggcagcgcggatgtgctggaaaagctgggggtttccattcaagccactccagaaagcgttaaacgcagcattgaaatgaaacaaatggggtttttgtttgcgccgctgtttcattcgtcaatgaagcacgtcaccgccgcaagaaaagagcttggcttccgaaccgtatttaatctgctgggcccgctcagcaacccgctgcaggtgaagcggcaggtgatcggcgtctattcattagataaagcgcgcctgatggcaagcgcgttggaacaatttgatgtcagacacgtcatgcttgtgtcggcccgtgacggattagatgaactgtccatcacagcaccgaccgatattattgaactgaaaaacggtgaacgtctggaatattccgtttcacctgaacaattcggttttgcagaaggttcactaaaggatattcaagtgagttcatcggaagaaagcgcgctcctcattcagaatatttttgcaaatgaagctccgtcatccgctctgcatattaccgccttaaatgcgggcgcggccatttatacggcaggtcttgcaaacgatctgaaagaaggaacgaaaaccgccttagaagcgattcaaaacggagatgccaaaaggcagctcgaacgtctgaaacagaaagaggaagaaatgtatgcttgatcaaatcattcagcagaaaaaagaagaaatcaaatccatcgtgctgccggaaacttgtcaaattgaacggagatcctttaaagaagcgctcctgaacccgaaccgttttatcgggctgattgccgaagtgaaaaaagcttcgccgtctaaaggattgattaaagagcattttgttccggaaacgattgcggcggattatgaagcggctaaagccgacgccctttcggttctcacggatacccgtttttttcaggggagaaatcaatttctgacagatgttaaacaaaccgtgtctcttcccgtgctgagaaaagattttattattgattcccttcaggtggaggaatcgttcaggatcggcgccgatgccattttgctgatcggggaagcgctggaaccttcagagcttcatgagctttatctggaagcccgcgagaagggcatggacgttctcgttgaaatccatgatgaaactgtgcttgaacggattttacaagtgtttcagccggacattctcggcataaacaaccgggacttaaaaacgttccgtacttctgtttcgcaaacggaaaaaatagcgcagcttgtaccggacggctgcctgctggtcagcgaaagcggcatcggttctttggctgacctgcaattcgtcaacaagcacggggcgcaggctgtattggtcggagaatccttaatgagagaggattcgcagcaaaaggcgatccgcggactgttcggggagtgatgatatgaaaaagcctgaggtaaagtactgcgggatacgatcgaagcgtgattacgaacttgcggcagcttcaggagcggattatctgggatttatttttgccgcaagcaaacggagagtaacgccggatgaggtccggaaatggaaagaggaggtccggacagacaagaaacatgtcggagtatttgtaaatgaaacgatagaaaacatcgcgcaaatcgcctctgatctggcacttgacgtcatccagcttcacggtgatgaatcgcctgagcatgcccgccgcctccgcccgcttgtgcgctcggaaatatggaaagcgctccatcacggggaagggacgcttcgtcagatggctcaatttgcacctgatgtcgacggctatgtcattgattcttcagtaaaaggaatgagaggcggcacgggaatcgcgttttcatgggctcgtgtccccttgtaccgaaagcaggctcaaaatgcaaacaagcgctgttttattgcgggcggcgttaatcctgaaacgattaccggcttactgagatcgcgtccgtgcggtatagatcttgccagcggaattgaaaaaaacggacaaaaggatcaaacactgatccggcttttagaagaaaggatgaaccactatgtatccatatccaaatgaaatcggaagatacggcgaattcggcggcaaatttgtccctgaaacattgatgcggccccttgaggaaatcgaaacggctttcacagaattaaaaaatgatcccgtttttcatgccgaatataaaaaattattgtttgattactccggaagaccgaccgcattaacgttcgcagacagggtgtcagagtatttgggaggggcgaaaatctatctgaaaagagaagatttaaaccataccggctctcataaaattaacaacgcgttaggccagattctgcttgccaaaaagatgggcaaaacgaaaatcatcgccgaaaccggtgcgggacagcacggtgtggctgccgcgacagccgccgcaaaattcggttttaagtgtacagtttttatgggtgaagaagacgttgcacgccagtcgctgaacgtattccggatgaaactgctcggcgcggaagtggtgccggtcacaagcggcaacggcacgctgaaagatgcgacgaatgaggcgatcaggtattgggtccagcattgtgaagatcatttctaccttatcggttctgtagtggggccgcatccgtatccgtatatcgttcgcgaatttcagaaaatcatcggcgaggaagcgaaagaacagctccgccgggttgaaggaacgctcccggacaaggttgttgcatgtgtcggcggcggaagcaatgcgatgggcatatttcaggcctttttagacgaagatattgagctgatcggcgccgaggcggccggaaaaggaattgatacgccgctgcatgcggcaacgatcgcaaaagggacgctcggggtgattcacggttcaatgacctatttaatacaagatgaatacgggcagattatcgaaccgtattccatttcagcaggccttgattacccggggatcggccctgagcacgcctatctgcataaaagcggccgtgtaacatacgaaagcgtgacagacgatgaagcgattgccgcgttacgtctgctttctgaaacagaaggtattcttccggctattgaatctgcccacgctctggcaaaagcgtttgaaatggcaaaagacatggataaagacaaaatcattctcgtcagtttgtcgggaagaggagataaagacgttcatacgctgatgaatgttttggaaaacggggtggggacacatgtttaatctgcgagattctgaaaaattatttatcccttttattacagctggcgatccgcttcctgacatttctgttgagctggcaatatcattgcagaatgcaggcgcctctgcccttgaaatcggcgttccttacacagatccgcttgcggacggacccgtcatacaacgggcttcaaaacgggctctggaaaacggaatgaatatcgtaaaagccattgaacttggcagcaaaatgaaaaaaaacggcgttcatattccaattatcctctttacgtattataatcctgtgttacaattagaaaaagaatactttttcgctttactgcgggaaaacgacatagacggtctgcttgtacccgaccttccattagaggaaagcgcccttttgcaaatgacatgcaaaaaggagaacatcgcttatatctctctggttgcgccgacaagtgaagaccgtttgaaaataattactgaacaggcctgcggctttgtgtattgtgtatcctctttaggagtgacgggcgtacgcagcgaattcgatccgtctgtatactctttcatacgtaaggtgaaagaattcagctctgttccggtggcggtcggttttggcatttcaaaccgcaaacaggttgacgggatgaatgaaatatctgacggtgtcgttgtcggcagcgcgcttgtcaaaaaagttgaagagcttaaaacaaagcttgtgaatcccggaacaagagctgatgcgcttcttgaatttgaagaatacgcaaagacgttcggacgactgtacagtgtaaaatgaggtgactggatttgcagattaaagaacagctgcggcagctgaaaccgtatcagccgggcaaaccaatagaagaagtgaaaatggaatacgggcttgagaaagtagtgaaactcgcttctaacgaaaatccgttcggctgttcacaggccgctaaagatgcgctgcatcaggagattgagcagcttgcgctgtatcccgacggttacagtgccgctttgagaacacggctcagtgagcatctgcaggtcagtgaatcttcgatcattttcggcaacggctctgatgagcttgtgcagattatctgccgttctttattaaatgatcaggcaaacacgattaccgccgccccgactttcccgcaatacagacacaatgcggtgattgaaggcgctgaggtgcgcgaggtgccgctccgcagtgacggcgctcatgatttggaccggatgctggaagcaattgacggcgggacgaaagtcatatgggtatgcaaccccaataatccgacggggacatatacttctgagcaagagctaattgcctttttaaacagagttcccgagcatatactcgttgtacttgatgaagcgtactacgagtatgttacggcggaagattatccagaaagcattccgcttttaaagcaatatccgaatgttatgatcctccgcaccttctctaaagcgtacggacttgccgcgctgcgcgtcggatacggcattgcggacgaagcactgctccgccagattgaaccggcgagagagccgttcaatacgagcagaatcggtcaggcttcggcactggcagcgcttgatgaccagacatttattcaggaatgcgtcgagaaaaataaagcaggccttaagcagtattatgattttgcagaaactcacggattaacttgttatccttcacaaaccaactttgtgctcattgattttaaccgcccggcggatgaactgttccaagccctgttggaaaaaggatatatcgtccgctcaggacaggcgctcggatttccgacagcgttaaggattacggtcggtacgaaagagcagaatgaggaaattctcacaattttagctgaaatgttataagaggtgatcaggcatcacctctttgctctattaaaatagttgaaaaaggaaatgagtgaaatgaaggatactatattgcttgcggggatcgggctgatcggcggatcgatcgcattggccatcaaaaaggagcatccgcataaacggattatcggtgtggatatttcggaagaacagctcactgccgcgctgaagctcggaattattgacgagcgggccggctcatttacggaaggggcgcagcaagcgtctgttgtcattatcgccacgcctgtcgcccaaacgctgaaaatgctcgatgtgctggccgcatcagacatcacccatgaactcctgattacggatgtgggcagcacgaaacagaaagtcgtcagctacgccgacaaagtgcttccggctcactatcaatttgtcggcggtcatccgatggcgggatctcataaatccggggccgctgccgcgaaagaatttttatttgaaaatgcgttttatattttaacacccggaaaatcgacttctaaagagtcagtaacgcatctgaaggaactcttgaaagcggcaaacgcccactttgtggagatgactcccgaggagcatgacggcgtaacgagcgtcatcagccatttccctcatatcgttgctgcaagcctcgtacatcaggctcatcatgctgaagaagattatccgtttttgaaacgtttcgcagccggcggttttcgggacatcaccaggatcgcctcaagcagcccggcgatgtggagggacatacttcttcataacaaagataaactgcttgaccgcttcaaagaatggaaacgggagattgacacgatcgaatcttatgtagaaaatgaagatgcggacagcctgttcggatattttaaaaaagcgaaagattatcgcgacggtctgccgctccgtcaaaaaggagcgatcccgtccttttatgacctttatgtcgatgttcccgatcatccgggggtcatttcggaaattacggcgatattggcagaagaaaaaatcagtatcaccaacatccgcattatcgaaacaagagaagatattaacggaattctcagaatcagtttccagactgatgatgaccggaagcgcgcggaaacctgcattcaatcccgcgccaaatatgacacattttacgctgactgaggtggaaaacattgaaaagagaaaaagtgacgtctttaaacggtgaaattcatattccgggggataagtccatctcccaccgttctgttatgttcggagcgcttgcggaaggaacgacaacggtaaaaaactttttgcccggagccgattgtctgagcaccattgcctgcttcagaaaaatgggtgtctccattgaacaaaacggaagtgatgtaacgatatacgggaagggcattgacgcactttgtgagcctgacagccttcttgatgtcggaaattccggcacgaccatccgcctgatgctcggcattttagccggacgcccatttcacagtacggtagcgggcgacgaaagtattgcaaagcgcccgatgaagagggtgacggagcctttaaaacagatgggagccgcgattgacggaagagcggacggaggatttacgcctttatccgtaagaggcggacaattgaaaggcattgattacgtctcccctgttgcaagcgcgcagatcaaatccgccgtgctgcttgccggattgcaggctgaagggacgacgaccgtcactgagcctcataaatcaagagaccatacggaacggatgctgaacgcttttggcgccgagcttgcggaaacggagacgagcgcttccgtaacgggcggtcagaagcttcagggggctgatattttcgtgcccggcgatatttcttcagcagcctttttccttgcggcaggcgctgtcgttcccggaagccggattgtgctgaaaaacgtcggcctgaacccgacacgcacaggaatgattgatgtcttaaagcaaatgggagcttcacttgaagtgattccttcaggagcggacagcgcggagccttacggagacctggttattgaaacttcagctctgaaagcggcagaaatcggcggagaaatcattccccgtttaattgacgagatcccgattatcgcccttttggcaacgcaggctgaaggcacaactgtcattaaagacgctgcggagctgaaggtgaaggaaacgaaccggatcgacaccgtcgtatcagagctccggaaaatcggcgcagacatcgaaccgactgaagacggcatgaaaatacacggcaaaaaaacgcttgcgggcggagccgatgtgtcaagccacggtgaccaccgcatcggcatgatgctcggtatcgcttcatgcctgacagaagagccgattgacatccgtgatactgaggcgatccatgtctcatatccgacattttttgagcatttagatcaattagccaaaaaagcctgaagagattggaactgaccccataagatgagacaaacaaaaaacaccttcaagtttgaaaacggaccgttgttatccgaaataaaacttggaggtgtttttctatggggacaagagtgagttatccggttgaagtcaaacagaaggctgtaggaatgagattggcgggcgtgcctatgaaagagatcatgcaggaattgaatatcaaaaataagactcaggttcagacatgggttagatggtataaggctggtgatacacatcgattcgaacagcctgttggaaagcaatacacttacggaaaaggtccggagtattcttccgatttagagaaactgcaggcagagattcgttacctgagacaacagaatgaagtgttaaaaaagtacaacgaattggaaaggaagctgatagggaaacgacaatcaaactggtagaagaattgcgcaagacgatgacggtacaggacatctgtgtccatttagatatttcacgcacttcatattatagatggagaaagaatctgactaagagtaatcctaagatacgactggagaaacaaatcggcacgttgtgccgagaacacaagtatcgatatggatatcgaaaaatcacagccatactaaaaaagagaataagtattaatcataaatctgttcaacgtattatgcagaaaaatcaatggcagtgtcgggttaagatgaaaaagcgtaaaaaaagtgggcattcatattctgtggtcgataatatattggatcggaactttcagtctgatcgccctcttgaaaaactggtaacggacatcacatatttgccttatggacagaaacaattgtacctttccagtatattggatttatacaatggagaagtgattgcttttacgattggagataagcaggacacagactttgtcttagacacacttgatcagctgccaacacttcctgaaaactgcgtgttacatagtgaccaaggttctgtttatacatcttatgagtatcagaaagctgttaaaacaaaaggcattaccatgagcatgtcccgcaaagggacgcccgctgataatgcctccatcgatcgtttcattcctcactaaagtctgaaacgttctatcttaacagcattgatcgaactacgaccgccatcgtagaacgcactgccatagaatacattcattattataacaatattcgtattcaaacgaaactaaacagccaatcgccgatacaatatcggcaattggctgtatgaaggtgttttgatccctgtctcaaaaacggggggcagtccccattcttcgggcttttttcttcatgtgtcataaaactttgggctttgacatagcttgtcttaaacagaaaataacagaaagggggaatgcgttttcgttacagaaacagccggaacaaattgcgctgtttgcgtataaagatgccgtccccttttttgccgttttcctgttaaccattttctgataaactataatgccgggtgaagcatcttatttgcgggcaggccctgtctgaattatgataagaataacccgaataaaaacccttttcattggttgatgaggtataggaaaagaaaggaccggtctgatttgaatacattgatccaagaagccataaaattagttgaagcaggtgaaaccgaaaagggactcaaagcgctttcaaaagctgaaacgcagcttcatgatgaagacaaagccattgcagcccagctctactatgaatggggaaacgccgaaaaagcgttagcgctgatcagtgatctgcatgacctttatccggatgagtctgagctgacgaatttttacgccgaattgttaatagatattgatgaagaagaaaaagctcttgaggtgctggagacaatttctccggaagacccgtcttacgcggaaagccttcttttaatggctgatctgtatcagatgcagggcttatttgaagtaagtgagcaaaagctgttacaggcgaaagcgatgttacaagatgaacctgttattgatttcgctctgggggaattatacttcactcagggatcatacgcaaaagccgttccttactatgaagagacggcaaaagaacggcacgaaatcggcggcgtaaatgttcatcagaggctggctgagtcattgagcgcggcgggtgaatttgaggaagcgatttcatggtatgaaaaagcggcggcagaacatacagaaccgaatacgattttcgggtacgggttcacagcctatcaggcgggaatggtcaaaacagccatcaagcagctgtctgatttaaaagggcttgatccttcctattcatcgctttatatgccgcttgcaaaaagctacgaggcagaaggcatgtatgaagatgcattaaaaaccgctaaagaaggtattgcttacgatgaatacaataaagagctttttctctatgcggcgaaaatggcgttaaagctcggcaacgaagaggaaggcaaaaagcttcttcaggaagcgctggcgctcgatccgggttacgtggaagcgctccatacgcttttagccgtctatcataaagaagaaagctttgaagagattattgatctgattcaggaagtccgcggctacggagaagaagatccgaaatacaattggtatttggcgggtgcttatacaggccttgagcaatacgctgaagcgaaaaaaagcttcgaagctgcgtatctccattatcaggatgatcgggatttcttatatgaatacgctcacttcttattggaagagggtctccagaaagaagcgctgccgcttttaaaacaagtgctttcaatggatggaacaaacgaagagcttgaagaaacaatcttacggatagaggatgaatttttaagataagcaggattttggaccatgcttgctgaatgtataagtgatgtcagattatacgatcgatagaggagggaattacatgcagacccctgtttctgtcaatgaaaaaaaggattttatccgttggtttttaaatcattatcagcttaaacgccgggagtgcgtctggattttaaattatttaatgagtcatgattcattaatggaaaaagtccattttgtagaacaagccgaattttgcccgcgaggcattatcatgtctactcattgcgttgatgaggtgccgtttaggttttacaaagaaaatgtcatgactacggacgcggaaaaatcttttcacgacatccggttaaataaacagcaggatttatttatccagctgaatttccgttcggcctacagctcaccggaatatgccgctgttcttgaatcaaatccgcatctgccgaaagacctgtttgaaaataaacaggatcaggggatggccgaaaaaatattagaacatgccatctccactttccggcgggaaaagctgcttaaagatatcgacgaggcgctggaccgccacgacaaagaaacatttgaaaagctttcccgccaattgaatcagctcacataaatgacagccttgcagaatatgcaaggcttgttgcgtaaagaggaggaacgagacatgagatggagggccgctgatgccgacgtctatttacaatctgcggattacattgataccgccgtcattccgttaatttccataacatcttcaggaggcttaaaagaggccgttgaacagggggaaagcacccaattgctttctgaagagcttgagcgccaattgaagggacgggtatatttattcccctcttatacatatgttgatatagaccaatcacaaatcgccctgcttcaaaaactcaaagacgaggtgatgaccaactttcggcacgtcttgttcctgacggcagacgaaaaatggaaggattttgaaatagggtctgatgtcatatacatacctgccgttccgtttgaacatatgaaagactctttaaagagaaaaattgcggatgacaagtgcggagaaattttgaacgttttgttacagaagtggaacaattcttaaaaacaccaggcatcccgcaaaacacccgttttgcctctgttgaccttgctgaaagattcatatattatgagggtgtcaaatctcagaattattttctattttagttaatttttggtcaatctttagggggggaagagatgggcggaaaacaagatatatcaagaagacaatttttaaactatgcgctcaccggcgtggggggatttatggccgccagtgcgcttatgcccatggtccgttttgcgctggacccggtattaaaaccgacgggagatcaaaaaatggtgcaggttgtcagtgtggatgagctgacgaaggagccgaagcggtttgactttaaaattcatcaagtcgacgcctggtacgaatcggaagaatccaggtcagcctgggtttacaagcatggggatgaaattatagcgctttctccgatctgtaagcatttgggctgcaccgtaaactggaacaatgatcctaaaaatccgaacaagttcttttgtccctgccattacgggctgtatgaaaaagacggcacgaacgttccgggcacgccgccgctcgcgcctcttgaccgttatgagcaaaaagtaaaggacggctttttgtatcttggaaaagcaaagcctaggggggaagggtgacatgctgaacaaaatttatgactgggtggatgaacgtctcgatattacgccgatgtggcgggatatcgccgaccatgaagtgccggaacatgtaaatcccgctcaccatttctcggcttttgtctattgtttcggcggtttgacgttttttgtaaccgttatccaagtgttgtccgggatgtttttaacgatgtattatgtgccggatataaaaaacgcgtgggaatctgtgtattatttgcagaatgaagtcgctttcgggcagattgtaaggggtatgcaccattggggtgcaagtttagtcattgtgatgatgtttttacatacgctgcgggttttctttcagggagcttataaaaagcctcgggaattgaactggatcgtcggtgttctgatcttttttgtgatgctcggtctcggttttacagggtatctgcttccatgggatatgaaggcgctgtttgcgacaaaggtaggtcttcagattgcggaggcgacgccattgatcggagcgcaggtgaaaactcttcttgccggccaccacgatattgtcggcgcccaaacgctgacgagattttttgcgattcacgtattttttctccctgccgctttgtttgcgctcatgggcgcccactttgtcatgatccgcaagcagggaatttcaggaccgctttaatacaaatctgatataaaagggaggggacgacatgcaccgggggaaaggaatgaagtttgtaggagattcaaggataccggctgaaaaaaaaccgaatataccgaaagactattcagagtatcctggaaagacagaggcgttttggccgaacttcctgctgaaagaatggatggtcggggccgttttcctcgtcggatttctcgttttaacgattgtgcacgagccgcctttggaacgggtggcggacccgacggatacagggtatattccgctgcctgattggtattttctatttttataccagctattaaaatatgaatatgccgcagggagctacaccgttatcggcgcgatgattataccgggtcttgccttcgggtcgctgcttttggctccgtttctcgacagggggtctgaaagaaggccgtggaagcgtccggttgcggtcggcatgatgcttttggcgctttgcgctacggtctttttaacgtggcagtcagtcgcgacgcatgactgggcgaaggcggaggagcaagggaaaatcaaaaaagaagccgccattgatactgaatcagacggttataaggtatttaaagaacaaggctgtatttcctgtcacggggataatcttcaaggcggaagcgccggtccgtccctggtcgataacgggctgagcccggaagaaattaaaaagatcgccgtcaaagggaaagggcagatgccagccggtatttttaaagggaatgacaaacagcttgatcagctggcgaagttcatttctgaaacgacagcaaaataacgattgtgaagtagacaatagcaggatatacttttatgaaaagagctgaccggatgtcagctttttttgcatgatacatactttttacggactgagagttgatggtatgaggtggatttcttatcttttagggttgcgcggcatgcttctgcttgttcttgccgttaattttatcggtacggtgtacggctattattggtatgtgcctcagcttgcggacacgccgttccgatttctgatatttgtacctgacagcccgacggcgacgtttttcttcctgttcgtgcttctggcatttcttatgggaagaaacgcgccgctgtttgaagcgctggctcttgtaacccttgtaaaatacgggctgtgggcggtcggaatgaatgtctttgtgctggtcaaaatggggcagatgccttgggaagggtacatgctgattgcttcacattttgccatggccgttcaaggcgttttatacagcccgtattttcggttccggttaaggcatcttgccgttgctgctgtttggacgcttcataatgatgtcattgattatcttttcggcatgatgccccgctactcaatgctcaatgactatatgcaagagatcggctatgctacattctggctgagcatattttcactcggccttgcatactatttggtgatttctaaaagacggataaagcttgacttacactgatagaatcttggtctaaccttgtcccgctcctcatattctgtaaagagaaggagtgggagggacctctatgaaacgaaagctgacgatctgtcttttacttgctcttatgtgtttcatcacaactgccaaagctgaagatgagggcggtctcaaggaactgaacgacctttcggataccgttttccaaatgacgcggcattcgcagtatgatgaggctctgcaagtgcttggctactttaagaaaaaaatgacacacgtaaactcactgagcggcgccgaagtcaggcaggtgactctgggtttcaatgatttagtgcgcgttctgaaacaggcagacgcctcagataccgaaaaaatccgggcagccgcccagttcaggttggtaatggatgcgatggaagaccactccgatccgctgtggggttcgcttgaaagaccgattatggcgacattcagcgccttaaaagaagatgtcagcggaaacggaagtgaaaatttcaatgaaaagtggaatgaatttatatcattatatgatttaatttatcccagcctgacaatggatgtgtcggccggccagcttgatacggtggcgaaacatatcgaggtgattgagcaggacgggtttcagcagatgacaaaaggaacaaagcttgagcgtctgacgctcctgcagcaggatttaaagcgggtttttgacaaggtggagcgggatgatgctgacccttcgctgctctgggtcattctgacaacaggcggtatcattattactgcgctgacatatgtcggataccgaaaatacagagcggaaaaaaagaaagagaaaaagcgtgagtatcctaagtctaaataaacacaaattgctgtaaaggagctaagccagtgaaaaaactcatccagcaattggcttcaaaacacctcccgcagccgatcagaggcagaaaaggggcgactgacgaaggaccgcgaaacctcgcgcgtgacttccagaatcctgacatgctcgttccgccttcaacggatgcgggaacggttcaaaacttgaaattctcattttctgatacgcatatgaggcttgaagacggcggatggtccagagaggtgacggtcagggaactgccggtatccaaaaacatcgcggcggtgaacatgagactgaagccgggagctgtgcgggagcttcattggcataaagaagccgaatggggatatgtgattaacggaggagtccgtttaactgcggtcgatcaaaatggaaggaattttattgacaacgtaagtgaaggggatctgtggtattttccttccggcattcctcattccattcaaggattagagcagggcagtgagtttttgctcgtctttgatgacggctctttttcagaaaacagcaccttttcagtaacggactggtttgcccataccccgcgcagcgtgctggaggcgaacttcggtgttcccggatatgacttggcctacattcacaagaaagagcgttacatgttccagctggaaccgcctcccccgattgaaaaggcagcagtttcttccccggaaggcaccgttttggagcagttcagctacaagctttcccggcaggagccccttgttaccagcgggggaagagtaaagattgtcgattcaaaaacgtttaaggtgtcaaaaacgattgccgcagctctcgtggaagtcgaacccggaggcatgagagaattgcattggcatccgaatacggacgagtggcagtattatctttcaggagaagcgaaaatgacggtgtttgcggcggagggaagagcgcggacatttaactatcaagcgggtgacgtaggatatgttccttttgcaatgggacattatgttcagaataccggtgacaccgtgcttcgctttctggaaatcttcaaaagcgaccgttttgaagatgtctctttaaaccaatggctggcactgacgccgcagcgcttcgtcgagcagacgctcaatgtcagtccggcattcgcccgccgattgaaaaagaaaaaatcaccggttgtcaaatggaaacacaaacagtaaaggcggcaaaagccgcctttttattatcgtctgatcggatttttattttcatcaagcgtaaatccttcgccgagcacatcatggacgtcgcttactgcaacaaaggcgtgcgggtcaacggaagtgatgacgcttttcaaaagcacaatttcgtttttcggaacgacgcagtaaagaacgtccctgtcttcttttgtatatgatccctgtccttttaaaacagtgacgccgcgctccatctcttcaatgattttttgctggatcaaatcgtttttcgaagaaataatcgttgccccttttgccgcatagccgccttcctggataaaatcaatcaatctcgcagcgacaaaaacggctacaagcgtgtacatcgcttccttgtaagaaagatacgtaaacaaagaaagcagaatgacacaggcgtcaaaggcaaacatcgtccggcccatcggaattccgaaaaatttgttgatcagcctggcgatgatatcgaccccgcccgtcgtgccgccgtatttaaaaataatgccgagacccgcgccgataaatacaccggcgaataaggcggccagcgctaaatcatgcgacagcggcatatgaatttcgtaacgctgaaaaacactcagaaaaacagaaagagagacggtgccgatcagggtatagacaaacatcgtccggccgagcatacgccagccgatgaaaaagataggaatgttcaataccaggttggaaatagaagggctgatgtggaataacgcatataaaagcagcgtaatgccggtaaatccgccttccgccaaattgttctgcatattaaagtgaaccagtccgaatgaaaaaacagcggcgccgattaaaataaagcaaatgtttttgattctgatttctccaagcattgcatcaaaccccttttccttccataagattgcgtaaatattatagtggatacaaaagaaaacagcaaactgccgtttttaacatttgtcaaatgtacttgaattagctaacatggaagagatgacaggaggtattcgcacagtgagtgacaaaacgatgaaagacttacaagctgaggtcgatgaatatatcggccaattcaaagaaggctatttcagcccgcttgccatgatggcccgtctcacggaagaactgggcgaacttgcaagagaagtcaaccattattatggggaaaagccgaagaaaacgacggaaaatgagaaaagcatggaagaggaaatgggcgatgtgctgttcgtcctgatctgcctcgccaactcccttgatatttcattggaggaagctcataaccgcgtcatgcataaatttaatacacgtgataaagaccgctggactagaaaagaagaaggaaagtaggagaaaccatgtcaaatgaaaccattaaagtcgtcattgcaggaccgagaggcagaatgggccaggaggccgtaaaacttgccgtccgcacgcctcattttgagcttgtcggcgccattgaccatacatacgatcagcaaacattgcgggaagtgatgtcagctgattcagacgctcttatttatacggatatccgcgcatgtttccaagaaacaaaaccggatgtgctgatcgatttgacaacgcctgaaatcggcaaaaaacatacgaaagccgctcttgaacacggcgtccgccccgttgtgggaacgaccggattttctgaagcggatttagaggagcttcaagccttgactgaagaaaaaggaatcggcgccatcatcgctccgaactttgcattgggcgcggtgctgatgatgaagttctcacaaatggccgccaactattttgaagatgtagaaatcattgagcttcatcatgatcaaaagctggatgccccgagcggaacggcgctgaaaacagcggaaatgatctcaagcgtccgtacagaaaagcagcagggccatcctgatgaaaaagaaattctgccgggcgcccgcggtgctgaattaaacggcatccgccttcacagcgtgcgtctgccgggccttatcgcccaccaggaagtcatgttcggcatggacggccagacgctgaaactgcgccatgactcctataaccgggcttcctttatgtcaggagtgaagctgtcagttgagcaagtgatgaaaatcgaccagcttgtatacggactcgaaaatattatcgactgaatcggcaagggggagaacatcaaatgaaaatcgctttgattgctcacgataagaaaaagcaggatatggttcagtttacgaccgcatataaagatatactgagccatcatgagttatacgcgacaggtacgacaggcctgaaaatccaggaagcgaccggattgtccgttgaacgttttcaatccggcccgctcggcggagatcagcaaatcggcgcattgattgcggcaaatgccctggatcttgtcatttttctgcgcgatccgttaactgcgcagcctcacgaaccggatgtctcggcgctgatccggctgtgtgacgtatacgcgatcccgctcgccacaaatatgggaacagcggaaatcctcgtccggacgctggacggcggggcatttgatttccgcaatcttgtgcgcggaggagagccgaatgtctgaacacgttgatattctggcgttcggcgcccatagtgatgatgtcgagatcggtatgggcggcacgatcgcaaaatttacggctcaaggaaaaaccgcggtgatatgcgatttgaccgaggccgaactatcatccaacggaacggtagggattagaaaagaagaagcggcaaaggcggcacggattctcggcgtaaaagagagaatccagcttacgcttcccgaccgcgggcttttgaaaagtgaggacggtatccgccggattgtcagtgtcatcagagcctgccggccgaaaaccgttttcatgccttatccgaaagaccgccatcctgaccacggcaatgcggcggctttggtcgaagaagcggtgttctcggcgggaattcataaatacagagatcaccaggaactgccggctcataaggctcagcgcgtatactattatatgatcaacgggtttcaccgtccggactttgtaatcgacataacggaaaccatcgatctgaaaaaagaaagcctgcacgcctatcaaagccagtttattcctacggcgcagtcagtgaacacaccgctgaccaacggttatatcgaaatggtggaagcgcgggaaagactgtatggcaaagaagcagggacggggtatgccgaaggcttcttttcaaaacagcttcccgttttgaatgatgatgtttttgggggcggacaatgagaccattaaaaatagggattacatgctacccgagtgtcggaggctcgggtattattgcgacggaactcggcaagctgcttgcggaaaaagggcaccaggttcatttcatcacatcaagcatcccgttcagattaaatacatatcatccgaatattcattttcatgaggtggaagtcaaccaatacgcggtatttaaatatccgccttatgaccttacgctggcgagcaaaatcgccgaggttgccgcgcgggaaaatcttgatatcattcacgcgcactatgcgctgcctcatgcggtatgcgcttatcttgccaaacagatgctcaagcgcgacatcggcatcgtgacgacgcttcacggtacggacatcaccgttttaggatatgatccgtcattaaaagatttaatccgttttgccatcgaagcgtccgacagagtgacggcggtatcaaccgcgcttgccggagaaacatatgacttaatcaagccggataaaaaaattgagaccatctacaactttattgatgaacgtgtttatcttaagaaaaatacagagagtataaaagagaaacatggcattttgccggatgaaaaggtcgtcatccatgtttcgaacttcagaaaagtaaaacgtgttaaagatgtcatccgcgttttccgtaatatcgcagccaaaacaaaggcgaagctcctgcttgtcggcgacggaccggaaaagtgcgtcgcttggcagcttgtcgaaaaatacggactgcaagatcaagtgctgctcctcggaaatcaggacagggtggaagagctgtattccatcagtgaccttaagctccttctttctgaaaaagaaagtttcggactcgtcctccttgaagcgatggcctgcggcgtgccgtgcatcggaacaaatatcggcggaatcccggaagtgattaaagatcaagtaagcggttttctggtggaagtcggcgatattcaggcggcatctgaaaaagcgcttgccgttttagaagataaacagctcagcaaacgattgactgatcatgcgctgaaaatggtggagaccgccttttcttcgcaaagaatcgtcagtcagtatgaacggatttatgacgaattggcaggaccggagtgatcttatggaacaggaatttgtcaaagccctccccatccttcatcacctgatgaaggcgggccatcaggcgtactttgtcgggggagccgtcagagacagctatatgaaacgaaaaataggtgatgtggacatcgcaaccagcgcttcgccgaatgaggtggagcgtctctttaagcggactgtcgatgtaggaaaagagcacggcaccgtcatcgtcttgtgggaagatgaaacctatgaagtcaccacttttcgtgccgaatcagaatataaggactaccggcgccctgaagctgtgcggttcattacttctttatcagaagacttaaagcggagagacttaacgattaatgcgatggcgatgtctgccgaaggagagctgcttgattatttcggaggcgcacatgatatcggacaaaagctgatccgtacggtgggtaatcctgaagaccgttttcgggaagacgctctgcggatgatgagagccgtccgctttatgagtcagctcggctttctgttagaaaaagaaacaagagaggccgttataaaagaccgggagcttttggcacatgtatcagtagaacgaaagaccgtcgagtttgaaaagctgctgcagggcgctttctcacaggatgcaattcaaacgatggtgcagacaggtctgatacaagagctgcccggcctttccggttatgagcagcaaatgctggaagcgagcggctttccgttttcttctttagatgcacgcgaagaacgctgggcagcgctgttattgtttctcggtctttgtccgaaaagcgccgaggcgtttttaaaacaatggaaactgccgggaaaagtcataaaaaaagcggtgcagatcataagcgtttatccggcgcagctggaagcggaagcgatgtaccgggcgggagaggcgctgttatcagccgttaaaatcgggatgctgaaaaagcataagacgattgatgaacaaaagctgaaagaggttcagagcctgtatgagaagctgccgatcaaaagccttcgagacctcgacatttcaggcgctgatctgatggagctcagaaaccgccgcgcgggtaaatgggtggccgaagaacttcgccggattgaagaagcggtattggcagggaagctccctaaccgaaaacatgacataaaggagtggctcgcatcatgggatcaacattaagaacccaattaattgatttattttctgaggcgggtgacggctttatctccgggcagaaaataagtgacgcgctcggctgctcgagaaccgccgtttggaaacatatagaggaactccgcaaagagggctatgaggttgaggcggtcagacgaaaagggtacaggctcattaaaaaaccggggaaactcagtgaatccgaaatccgtttcgggctgaaaacagaggttttgggcaaacagcttcattaccgggacgtcctgccgtccacccaaaaaaccgctcatgaacttgccaatgacggcgcgccggaagggacgctcgtagtcgccgataaacaaacggaaggcagaggaagaatggccagagtatggcattcacaggagggaaacgggatttggatgagcctcattctgagacccgacgttcctttgcaaaaaacgccgcagctcaccctgttatccgccgttgcggtcgtacaggccatcgaggcttttacaggtgtacagcccgccattaaatggccgaatgatttaatgattcacggcaaaaaagccgtcgggattttaactgagctgcaggcggaagaagaccgtgtccgttcggttattctcgggatcggcatcaacgtgaaccagcaggaagccgattttcccggagagcttcaggacattgcgacaagcctcagcatggaagctggcgaaaaaattgacagagcgggtctgatacaagagattctgctgacttttgaaaaacgctatcaggattatttgaaccacggctttacaccgatcaagctgctatgggaaagctatgcggtcggactggggaacgagctcagagcgagaacgctgcaagggacgttttacgggaaatcgctcggcattgatgatgagggagttcttctcttggaaacgaaagacggcataaagaagatctattctgccgatattgagctcaattaatcttagttggtacaagcctcgtgaatttggtatacttcctatgggcagtatcataatgaactgcacctgatcagcagaacagagattacgaaaagtctgccttgatccaaaaaaggactgggacagagggatgacattcgccgaacgttaaacaagtgggaatccttcttattttacagaaggcttttttgcttgcgaagaattggcggctcatctcctcaccgtttagaggaggagaaacagaatgaaaacaaaactggatttcatgaaaatgaaggaaaacggagagccgatcgtgatgctgaccgcttacgattatccgcaggcaaagcttgcggaacaggcgggagtcgacatgattttagtcggggattcgctcggaatggtcgtgctcggactcgattcaacagtcggcgtaacggtcagtgacatgattcaccatacaaaagcggtaaaacgcggtgcgaaaaatacgtttatcgtaactgacatgccgtttatgtcttaccatctttcaaaagaggacacattgaaaaacgccgcggccattattcaggaaagcggcgcggacgcgttaaagcttgaaggcggagacggcgtttttgaatccatccgcgcgctgactctcggcggaattcctgtcgtcagccatttaggcctcacaccgcagtctgtcggcgtattaggcggatataaagtgcagggaaaagatgagcaaagcgcgaaaaagctcattgaagacagcatcaaatgcgagcaggcgggagcgatgatgctcgtgcttgaatgcgtgcctgctgaactgactgctaaaataaaagaagaagtatccattcccgtcatcggaatcggagccggttcaaaagcggacggccaagtccttgtctatcatgacgtcgtcggccacggcgtggacagaacaccgaagttcgtgaagcaatacgccaaaatcgacggcaagattgagtcggccctcagcgattacgtccgtgatgtgaaagaacgggttttcccggaagaaaagcattcctttcagataaaccaaactgtgctgcaaggcttgtacggaggaaagtaagcgatgaaacaactgacagaaactcaacagctgaaagaattaattgcacaataccgctcagaaggccggacgatcggattcgtcccgacaatgggttttcttcatgaaggacatctgacgctggttgaaaaagcaagcaaagaaaacgatattgttgtgatgagcatctttgtcaatccgactcaattcggaccgggcgaggattacgaagcatatccgcgagatttaaagcgcgatgcccggcttgcagaacaggctggggcagatgttttgtttacgccgtctccaagtgatatgtataaaggcgagcaaaatgttgccgtgcaagtgaaaaggagaactgacgtgttgtgcggcgcctcccgcgtcggccattttgacggagtggccactgtgctgacgaagtttttcaatctcgttaaaccgacccgcgcctacttcggcctgaaagatgcccagcaggcagcggttgtggacggattaattgaggatttctttatggatatcgaattggttgcagtggacacggtcagagaagaagacggacttgccaaaagctctcgcaacgtctatctgactgagcaggaacgcaaagaagcgccgatgatctataaagcattgcagcaaggcgctgaactgatcagagacggtgaaagaaatccggaaaccgttataaaaaccgtcaccgatatcatcgaaaacacaagcggcgtcattgattatgccgaactgtacgcttatccggagctgactccgcttaaaacattaaacggcaaggtcattctggcctgcgccgtccaattttctaaagccagactgattgataatatcattattgatattgatgaatgggagagatcataatatgtaccgcactatgatggccggaaaactgcaccgcgctaccgtgacggaagccaatttaaactatgtcggcagcattacgattgatgaagatcttttagatgccgtcggaatgctcgctaatgaaaaagttcagattgtgaataataataacggagcgagacttgaaacgtatattattcccggtaagcgggggagcggcgtcatctgtttaaacggagctgccgcccgtctcgtccaagaaggagataaagtcattattatttcttatcaaatgatgtctgatcaggaagcaaaaagccatcagccgaaggtggccgttctggatgatcagaataaaatcgagcagatgctgggccaggagccggcacacacgattttgtaaaagagcccccttcatgggggttttcttttaagatttaggggcaaaagctgtttttccgctccatttctcaacaaaacgtgttacacttttctcgtatgcaagaattgaggtgtccattttaatgaacaaacaacggttcgttgtcatagatgtcgaaacaacaggaaattcgccgaaaaagggcgataaaatcattcaaatcgcagcggttgtcattgaaaatggacaaataactgagcggttttcaaaatatatcaatccgaatcaggccatcccgccgtttattgaacagctgaccggaatttcgtccggaatggttgaaaatgaactgccgtttgaagcggtcgcggaggagatttttcatctgcttgacggcgcgtattttgttgctcacaatattcatttcgacctcggatttgtccggtatgaactgagcgaagcgggctatgagctgccggattgtgaagtgcttgatacggttgagctttcgcgtattgttttcccggggtttgaagggtataagctcggtgagttgtgcgcggagctgaatattgttcatgaccgccctcaccgcgcagacagcgatgcggaggttacgggactggtctttttagacattttacataaactgaaacatttgcctttaccgacattaaagcagcttagaaggctttcacagcattttatcagcgatttgacgctgcttttggattcttttatacatgaaagcaggccggcggaagaaaagagctgcattccatacgcctctttttcaattaaagagcccgatcacattccggtttcccgtccggtgaatgcggccattgaccttgaaaagtggaacgaagaaaaagaacagatcttatccggcatcatcccccgctatgaaaagcggacagggcagctttcgatgatggatgaagtgcttggcgccttccgcaatcgggagcatgcgctgattgaagcggcacccggcatcggaaaaacgatcggttatctcgttccggctgttttatttgccaaagcggagcaaactcccgtgattatcagcacgtactctactcttttgcagcagcagatcatgtctaaagatcttccgcttttggatcgtatgtttccttggccggttaaagccgctattttaaaagggaaatcacattatctgtgcctgcctaagtttgaacatattctgcatgaggaagatgacaactatgatgcggttttgacgaaagcgcagcttctcgtctggctgacggagactgaaacgggcgacgccgctgagctgaatcttccatcaggcggcagattgctgtgggagcgcatggcttacgatgagaattcttttttgaaaaaagggaaggactcggctgccgggttttatgaacgggctaaagaaaaggcgcaggccgcagatctgattatcacaaaccatgctttgctgttttcagatcaaagcagtgaaacgaaaaaactgcctgcaagcggaacgatcatcattgatgaagcgcatcatttcgaacgcgctgccagcgagcacctggggaagagagcttcatacatcggactgcacacaaagctcagccgaatcggaaccttaaaggaacacggactgttaaagcggatgagaaaactgttttatacgtatgaactgccggcggaaagtttttttgacgccgatgagtggatgaagcatattcaatcggaaagcgacgcatttttcagttcagtgcattcttttgtcaaacgaagaaaacctaaagacgatctgaaccgtctcgtttatagtctcaatcataaaagccaggataaagggtttcacatgataacggacggagcggagcggctttgtgcgatgctggatcagctgcttgacatgttttcagtacaggagaaactgttacatcaaaagcttgatcagatgaaaagcggagcggcttttttagcggccgaatatgtaaagtgtatcagggggctgaaagaatatcgcgatacgttcagcaggctgctgtttgaaaatgatgagaaagaagccgtttgggttgaaattgacgcgaagggcgcaaaaaatgccgtcagcatctatgcgcagcctttggagcccggtgaaatgctggcagaccagtttttcgcccgcaaaaaaagcgttgtgctcacatcagcgaccttaatggtggagcattcttttcaatttatgattgaaaggctcggacttgcggatttttatccgcgcaccaaaagcatcccgtctcctttttcttacgatgatcagatgaacgtcatcattccgaaagagatgaaatccgttaaatatgacggagagcgggaagtcattgagcatattgccaagtatgcagaaatcatgtcaaagggaaaacagccgaagatccttgtcctgtttacgtctcatgatatgctgaaaaaagtgtatcaggaactgaaactcagtatggagatatcaggcattcagcttctcgcccaaggtatttcgggcgggagtcccggtaaattaatgaaaacctttaaaacggcaagccgggcgattttgctcgggacaaatcatttctgggaaggcgttgattttccgggggatgaattgtcaaccgtcatgatcgcaagacttcctttcagggcgcctgacaatccgcttcatgccgcaaaatgcgaatttgccaagaagcaggggaaaaatccgtttcagacgatttccctgcctgaggctgtgttaacgttcagacagggggtcgggcgcctgctccgtacggcgggagacaagggaacaatcgttcttttagatcagcgtgtaaagacggcgggatacggacggctgtttcttgaagcgctcccgacttcatcccttttggagctgacggatgccgaactcggggcttatgtcagccaaacggaataaaagccgcataatcgcggctttcgtggtgtgggatgaggaattgtttttatagtaaaagcgggttcatgccgccttgtgattttattatgccgcgggcgcatcccgttatgactaacaaaatttgttcgaccgatggagggtataaaaatggaaagcaaaattgaaattctgtcaacgattaatgtggagcattcagatgatttatataaaatcgtcgatacattaaaccggactttgaaacgggacaatctgatgttcgggcttgcgctcgacgaagaaaatcaaaatgaagcggtcttcaccatttatcgcacataggtgaaaaagatgagaaaaaaagcattaatatttacagccgtatttggtattatttttttagcagttcttttattttcggccagcatttttaaatctgcaatggctcaaaaagaagaaggccacgaaacagctgccgcagccgctaaagaaaaaacggatctgacagatgctgagaaagttgagacctttgtcggcaaacagaaatattatgttgttaccggaacggataaacatggaaaagatatgtatgtatgggttccggccgacaaaaaagcaaaaattctctcaaaaaaagccagtgacggcatttcaagcggcaaggctgccaagatcgttcgggacgaagggcttgtttccaagctgaatggcgttcacccggcgagagaaaacaatgttccgttatgggaagtgacctatatcaacaaaagcgggcagtatagctttagttatgtggactttacaagcggcaagattctcaaaaacatcacaccgtgagacgtattagggggagttcaagttgaaattggcaaaaagagtatccgcattaacaccgtctgcaacacttgcaattactgcaaaagcgaaagagctgaaagcagaaggccatgatgtcatcggcctcggagcaggagaaccggattttaatacgcctcagcacattatagatgccgcggtgcgttccatgaatgaaggccatacgaaatatacgccatcaggcggtctgccggcgctgaaagacagtattgcaaaaaaattcaaaaacgaccaggggattgaatataagccgtcagaaatcattgtctgcaccggagcgaaacacgctctgtatacattatttcaggttattctcgatgaaggggacgaagtgattataccgactccttactgggtcagctaccctgagcaggtgaaactggcaggggggcgtcccgtctatgcagaagggctggaatccaatcagtttaaaatttcaccggagcagctgaagcaggctatcaccgagaaaacaaaagcgctcattatcaattcaccgagcaacccgacaggtgttatgtatacgaaagaagagcttgcggaactcggaaaagtgtgtctggagcatggcattctgatcgtttccgacgagatttatgagaagcttacatacggaggaaaaaaacacgtctcaatcgcacagctttcagataaattgaaagagcagacgattatcattaacggcgtgtcgaaatctcacagcatgacgggctggaggatcggctatgcggcgggttcggagacgattattaaagcgatgacgagccttgcaagccacagcacatcaaatccgacgtccatcgctcaatacggcgccattgcggcctataacggtccggctgagccgctggaagagatgagacaggcatttgagcacagactgaacaccatttacgctcagctcggtgaaattcccggattcacctgtgtcaaacctgaaggggcgttttacttgttccctaacgccaaagcggccgcagaaaactgcggattcaaagatgtcgatgaatacgtcaaggcgcttctggaagaagaaaaagtcgccgtcgtaccgggctcgggcttcggctcaccggacaacgtccgtttatcttacgcaacgtcactcgatcttttagaagaagcggtcgaaagaatccgccgcttcacggaaaaacacagctgattctgaaaaagcggcttttaaagccgcttttcacttgcattgaccccgttagagtagaacgggtataataaagtgatgaaaaaagagattcaggcagattcctgaatgtctttcttgttctggagggaaagagtttgaaaacaacaatcaaccaagtgtataaacacacaggcgaggaagtaacgattggagcttgggtcgctaataaacgctcaagcggtaaaatcgcatttttacagctgagagacggtaccggcttcattcagggagttgtcgtcaaagctgaagtagaagaagacatcttccaaatcgcgaaatcagtgacgcaggaaacgtcactttatgtaaaaggaattgtgaaagaggacgagcgttcaccgcttggctatgagcttgctgttacatccattgaagtcattcacgaagcgactgattatccgattacgcctaaagagcacggtacggaattcttaatggatcacagacatttatggctccgttcgaaacgccagcacgcaattatgaaaatccgcaacgaaatcattcgtgcgacttatgaatttttcaacaaagaaggcttcgtgaaagttgatccgccgattttgacgggaagcgctcccgaaggcacgactgagctgttcgcgacgaaatattttgatgaagacgccttcttgtctcaaagcggccagctgtatatggaagcagctgcaatggcgctcggaaaagtattctctttcggaccgacgttcagagcggaaaaatcgaaaacgaaacgccatctcatcgaattctggatgattgagcctgaaatggcatttgttgaatttgaagaaaaccttgaagttcaggagaattatgttgcatacatcgtacaaagtgtgctggaacattgtaagatcgagctgaacacattaggtagagacacatcgaagcttgaacaaatcaaagcgccattcccgcgcattacgtacgataaagcgatcgaattcctgaaagaaaaaggctttgacgatattgagtggggagatgacttcggtgcgccgcatgaaacagcgatcgcagaaagctatgacaaaccggtgtttatcactcattatccgacgtcattaaaaccgttttatatgcagcctgccaaagatcgtgacgatgtcgtgttatgtgccgacttaatcgctccggaaggctacggggaaatcatcggcggttcagaacgcgttcatgatatggatttattggaagaaagattaaaagaacacggtctggattcagaggcttacaaatggtatgctgaactcagacaatacggttctgttccgcactccggctttggcctcggacttgagcggacagtggcttggatcagcggagcgcctcacgtgcgtgaaacgattccgttcccgagacttctgaaccgtctgtatccgtaatagttatgaaaaacgaagtctcctgcaagggagactttttctaagtaaaggggaaagctcccggagataaccttttacagtaagaggtgtaaggatgaaaaaacagcaatttatagatatgcaggaactcggcatttcaagcattcccaacctgctgttgacacattaccggcagctcgggctgaatgaaaccgaattgatcctgcttttgaagattaaaatgcatttggaaaagggctcttattttccgacgccgtttgaacttcagtcaggcatgtccatctctgctgaagaatgtacaagctgcctgagaatgtttattcaaaaaggttttctgtttattgaagaatgtgaagaccataacggcataaagtttgaaaaatattctctgcagccgttatgggcgaagctgtatgattacatgcagcattcacaaaacgaaacgcaggaaagaacgtcagaaagagaacaaaaaagcctgtataccatctttgaagaagagttcggaagaccgctgtcaccgcttgaatgcgagacgctggccatatggcaggatcaggatcagcatgatgcgattctgattaaacacgccttaaaagaagccgttttatcggggaaactcagttttcgctatattgaccggattttatttgaatggaaaaagaacggcttcaaaacggttgagcaggcgaaggcgcacagccaaaaattccggcgtgttcaaacgaaacaaaatgatccgcaaaaagagtatacgaggcaggtgcctttttacaattggctggaacaataacatgagaaggggagaaacgtgttaaatttaaagcagattgaatattgtcttgaaaaaatcggcgatatgtttccgcacgcagaatgtgaacttgtccattcaaatcctttcgaattggttgtggcagtcgcattatccgcgcaatgtacggatgctctcgtcaacagagtgacaaaaacgctatttcaaaaatataaacggcccgaagattatcttgccgtatcattggaagaactccagcaggatattaaatcaatcggcctgtaccgtaataaagccaaaaatattcaaaagctgagcaaaatgatcatcgaagagtacggcggagaggtgccgaaagaccgggatgagcttgtgaatctgccgggtgtcggacggaaaacggcaaatgtggtcgtgtctgttgctttcggcgtacctgcgattgcagtagacactcatgtggagcgggtctctaaacggctcggtatctgccgctggaaggactctgttttggaagtagagaaaacattaatgaaaaaagtgccgaaagaggattggtctgttacacaccacagattaatatttttcggcaggtatcattgtaaagcgcaatctccccgctgtgcggaatgtcctttgcttctgctatgcagagaagggcagaagcgtgacaaaaaagggctggtgaaacggtgacggcgattcacattctggcaggctatgaaacatacctgcgcagccttacggacttggaaagccttgaggtcaaaacggcgttgcgccgccatccgctgtatatggatttcagcggtcagccaatcgtgcagccatggagggaaaggggcgaatatgtcccgtttctgtttcagatttggaacgaaacgaaagaaacgctgcttcccgtttttcaaacaagaaaatcgagatgtgatcaaaatgacatgctgaagggaattgcctgtctgattgccgcttttcactggacggcaggggagcgggtcacatcactcgattggtctgtgcttgaaacaaagcattttcccgccgaaccgatcaattgggcggagcgaatggcgtttattttaacaaaaccgactcaatatcactcgtttattcagcttgatgaattgatgacggagatgaagaagcaatatcataaatatgaagccatgaacaaatgttaaaaacctccttttctcataaggaggtttttttgtatgaaaaaaatccttcacctggttgaggtgaaggatttcgtccgctaatgagcgggatttgactggatggttgacgaattggactgcccgttgatatttgaagatgagtcttggtttttgtccgtttgaccgttgtcaggtttatttgagccgtctgaaccggaatcggaatcattatcagagccgttatcttgctgtccgttgttatcggtcccgttaccgggctgattctgattgttgttatctgtttgatccttatcggattgatcctgatttttatccgggtcatcagttggtgtttgatccgatccgtcagacgtatctgtctgattgtcatctgtgtttgaatcatcggtttgcgttttgtctttgtctttatcttcatcagacttctgttcatcgtcagtcgctttatctttatccgcatcgtcttcttcatctttcgggactttgaaagaagctgatgccgtatcgctttttccgtcatcgttttccgctgtcacctggaagctgtatgtggagcctggtgtgacatctgagacgacggcttcttttgccgaactgttttgaatgtcactgtagcttccgccgtcaacggattgtttgacattgaatgttgcatcaccgtcataattccagcttaaagttaatgattttttatctttgtcgtatttcacttgcaatcctgtcggtttatcggctttttctttcgtgtacgttttagaaacggcagttggctgcgttcctttcacgaagtactccgtcacttttttatcatccggcgtattcggtccggctaaagcggcaggattcgagcctttctcaactgtttctttgacgacactgtcaggctgcttgaagcttcctttaccgtcatcaacgtaagagatcagcttttggaaaatccgttttgcgacttgctggtctgcagaagacagtgatttcttgcctgctttgttgccagactcaactccggtccaaaccgccgctgtatattgaggggtgtatccgacaaaccatgagtctgggactccgcccggagcaatgttatatttttgaatgtcctctttagtaaagttggtcgtacccgttttaccggcgacttccacgttcggcacctgagccagtttacctgttcctgattcgacagctgatttgagcatatcggtaatcataaacgctgtgtagtcgctcatagcacttttcggtttcggtgttaaatcaagcttagtgccgtcattaaattcaatcgatgtgaccgcgtgcggttcgttgtacgttccgttatttccgaacgcactgtaggcgcctgccatggtcatagtagatacaccgcggttaccctcaccaaatcccccgatagagtaaggttcatatacttgatctttgtttaatcccaatcctaagtcgtttgcgaagtcgacggcattatcttttcctgctgcttggtatgcttttaaagcaggaatattacgtgagtctgcgagggcctctcgcatagatatctgacctctgtatttattgtcccaatcatgaatcggtgtgccgtcagagtacgtataagccgaatcatcaatctgctcatacgtcgaccattttttattttcaatgaccggcccgtaatcaagaattggttttatcgttgaaccgggctgggttttaccttgtgttgcataattgaatcccccggtagttctgttccgtcctgctccgatagcgcggatttctccgtttgtcgtatcaaggagagtgacgccgccctgcatgccttccgaaaagccggctgtatctccgttcatcaattgatcaagataatcttgtgctttcgtatcaagagtcgtgtaaattttcaatccgtcagttgaaatatcgacgtctttcttttcttttgtctcaatttctttcataacttcttcgacaaaagcgctgtatttatttgtgtcctttttatcgtattccttttggctgacgacgccttcatctttcatggacactttctttgctttttggtagtcagaatttgaaatgaatccttgtttttccattaagctgagaacaatgtttcggcgtttttcggaagccttcggatttttaaccgggttatatccggtcgggctttgcggcattccggcaagcgtcgccgcctgttcaaccgtaagcttgctcaagtcttttacgccgaagaattcttcagccgctttaccgacgccgtaggcacgcggtgagaaataaattctgtttaaatacatctctaagatttcatctttagaataatggcgctccagctgcagtgaaagccacacttcctgtgctttccgtttaatcgttttctgatgggtcaaaagcgagtttttcacaacctgctgggtgattgtgcttcctccctctgaaccgaatccatctgtaaagttggcgaccaaggcgcctccgatccggatcgggtctataccgtggtgcttataaaaacgggcgtcttcagttgcgataaatgcttctttcacaacatcgggtatatccttaatcgggacgtaggttcgtttttcaccgcccacttccgcgatttctttgccgtttttatcgtaaatcgttgaagagtaaggcgttttcagcttggcttcgtccaaagacggcgcgccggaaaccaaaacggcaaatgccgccgctccgccgactatgccaaggacaaacagaataaccaaggacagtacaatctttttgaataaaccgcctttacgctgtttcttgccttttttcggtgaagagggcttagtgcttttcgtctgccttgccttacggcgttcttcacggctcgtaaattgatctgacataacatctcaacctttcgtttatcaacctttcgctcagtctactgttcctgcgaaaaataaagctgttcaataatactaatataatcaattctcggtgagtatccaagggaaatcggaaaggaagcatcttctaattcgtctttgcgaatcgattttctgccattgttctcctttctctcccaaaagacaaacagcttgtcggcttcgaggaaataaacctttccgaaagcggatataataacaaaacaaatgccgtcttgtctgaccacctgcttcatatgctcaatctgatgatcatgaaaattctgcaggggaaatgccgttttgttttttgtttcttttgcctcaaaatcaatgtagcgtcctttataaatgccgttgtagtcagttgtggaagactgtttaaaataagcttccttaatgactgcggcacttcttttcggatagtggacgtttacaatctggacgggtgtcggctttttgtgaatgacagcaatttggttagccagataatatttattcgtttcattcaggtcgtcttcgagggtcatgccgcgattactgtatgaatgagaccgtttctggctgttttgggatgaaaccgttttgttcggctgaaaagtttttccattcgggtaccgaatcactttttccatcctccttatcaaactaatagtgacggaagtgaatgaacgtgcataaacgacagaccgtaaccgccattcttcgcctgatcgaaaaagagacgaaaataaaaaatgccgataatatttcccggacgaatgcctataaagcatattatgaccgccatcctgagatcaagtggccgcttttggcatcctttgtgtcccgcaatgcgggctggtcgatgactgatttaagaggcatcctttatcaggagggccttgacagcagtcagaaaaactggtttttcctttcgtatgaaagggcgaattggctgattttttctgatgcctatcctcagcttctggtctaccagtggtcaaaacaaatcggcgaacctcttttccgtcatcttccttatttccgcgtctcggcttttatgcaggaagagtggtttcgcttttggcgtgacggagatacggaacggctcatgtatgctcttattataaatgaacaaaacactatccaagcacctattatacaaaatccttcgtttaaaaagaatgtttttggcacgattcctttttatttaagtgattggtttcactttaatacggtgatattcccttcatttgacggacatttatacggaatttccgtcaaacggttttcaaaaaccgaagagagaattacgctcggaaaacagctggcacgcctactgttcagccccgatcttcacgcttctttttaccgttttcttgataccgttcctcataccggttcacgctttgatatggagaaaatgatcggcatcaaaaaaagaacatcaccgatgctgaggacaacctatcccattgttgcccacccattagacggcgaaagggcggattggtttcaaaaaaggttaagaaaaggggctttcttacaggagaaaatgccgaaacagcttgaactgacggactggtacttccagaaaagacgggagctccatgcgctcttcgcggttaaagagtggctgaagaaatgaaaaagcccgaaaccgttcgctggggtttcgggctgctgatgtgttacgtggaagggcggtttgggccgcctaattttttatcaagcgtatcagtcgtttttgcttcggttttttgctgtttacctgcatttttcggtctcgttttcatacggcacctcctcaactgtatcgtttgcattaacgtgccggttcatacaaagtttgcggcacttttttgtcgaaaggcacgccttttaggataatctctgtttgtttgccgaactgcttctagttttgtcatgtgcagaggagagcggtatgaaaacgagaattatattcgtaagagacgcaagtgataaaagggaggaacatgaatgtctgtttacacgagcaaggctgatattctccgtctgctttctgatatcgaattccggatttctgctgctgaaaagacgcttacccaagcagtcagatcctgtcaggcggaagctgaagaaatcagacaggagaaactttcccgccttgaggaagaggcgcgggagcttcatgtttgtattgatgacctgtttttgactgaccggcgtaaaaaggatttgccgagagcctgccggatcagctgattttatgcaaaaactttggtaccatatgtactgaggtgagtccgtttgcagacacagtcgttattggagctgacagaacaaatgatagaggcggttctggaagccgaaaaaaggtatcaggatggaaaagagtcaggccgttcatatgatttttttgagattattaaacccgatgttgaaaaaagagaccggctttgcgcgctttggacagaagcagcgcttgcgtttattcaggaaaaccgtccgaaatacgttcatcacgcacaaattcaggccgttacagaaaatttcggagagctgatgctccgatcatatgttcatcatattcataaaaaaagatacagggatttaactgaatctgttttatatacgcttcgtatattgagggatgaaattgaaaaagaaggcagctgaaaacggctgccttcttttatataaaggggtcgggtatgttattcatacgccgggttttctgctccacttgcttcgagaaccttcatactgtttcgaaattcggttgcggtgagatggccttgaatatagaggaattttgcaaagtccatcagtttatctgcacaatctgtttcatattttttcacttcagcaaaacgctttcttaagtatgatacgttcataatggtgcatcccctctcatgtatgttgagattatggtaacataacgattcgacttttttctgtttttaaaaaattaagactttcgacagcatttgacaaaaatcagaatcaccgaaagcacataaccacggcggaattcatacatatatagcagaaacttagtgagagacaagggggaatgtcgtatgcaatggagagcagagccatatcaaaatatgtaccagcagccggcgggatatttctaccctcagcagatacagccattacagcagccgtatccgcagcagatacagccattgcagcagccgccatatcatcagcaagggcagtacccgcagcaattttatccgaatcaggaatacggtcatatgcagcagccgtttgctccccctcctcctcaggcagccatgcccggggggcagccggggtttgtgaatccttaccccgttcccagaccgaatcagcagcagtcttcccaattctcaggcatactctcccagtttaaaaaaacgaacggacagtttgactttaataaaatgatagatacaacggggcagatggtaagcgccgtaaatcaggtcggatcgctggtgaaaggcttcaccagtatcttcaaataaaaagcatgaatgatatccatcattcatgcttattttttagggaaaaagagggtaagcgtctgttcattccaggatgtttccatatcttcttcactcaccttatacgggaggacaacggttcttgtcatgcttgaagacacatgggatgaatgagcctgtttatgatcgtagcggattgtaacgtgaaggtagcaccccttcgtttccaccagcatatcaccgtcacggaatgtctcgggaacgctgatatcaaccgcgaggcccctcggctcttctctgacgtcaatcgtcacttgcgcttcagtaaaagccgaattgacaaggtgctgaaaaccctgcatcaattctgcgaagggacctgagtgaaaaaattggtccatcgcatggctgatgatgtcctcattactttgccgatcaagtttatcgttttgtgattgatccatatgaccaccgcctttttacaaacagactatgcgatgttatgccgtatggttaagaattgaaggaaaaaagaaagtatggttaaatagtggagaataaactggtaacggattcacatttaggaaggggagcacaacacattgctgaaaaaattattcggattgggagacagccggaaaaagccggccgaggaagtgattttttctccggctgacggagcggtgatggatttggcttcagtgccggatcccgtattttcacaaaaaatgatgggggacgggatcgccgtcgagcctgcaaacggagacattgtttcaccggttgagggagaagtgattcagctgttccatacaaaacatgctgtcggcatccgcaccctttccggagcggaacttttgatacatgtcggtttggataccgtcaatatgaacggcgaaggctttgaagcgcatgtaaaagaaggagacaaagtgaaaacaggcgatctgcttttaacgtgccggctggatttaataaaagaaaaagcaagcagcaccgtcatccctatggtgattatgaatggcgatgccgcagaacctttgcaatttgcaggcgcaaacgaagcgaaaaaaggacaaacagagctttttacgataaaaatgaagtaggcaggggctgattccctgctttttttcttgtacaggattttcatctagccaggcaaacaaatattcggtaaactgtacctcataaagaggtgtgaacgatgaagaaaaaatcattgagcgaactgatacaggaattaaaaaatcatgaaaatattgtgcattggcatgaagaggaaccgcgggaggcgaaaaccatgccgatgccggagcaagtagatccgaaaattcgggcggctctcgaaaagagggggatcgagcggctctttacacatcaatactccgcttttcagacggttcaaaacggagaaagcattgtggctgtcacaccgacggcctccggaaaaacactgtgctataatcttccggttcttcagtctatcgcggaagatgcctcaagccgcgcgctttatttatttccgactaaggcgctcgcgcaggatcaaaaaagcgagctgaacgaaatcatagacgagacgggcatggacattaaaagctttacctatgacggagatacgtcaccggccatcaggcagaaagtcagaaaagccgggcatattgtgatcacaaaccctgatatgcttcattcagccattcttcctcaccatacaaaatgggtgagtctgtttgaaaacctgaaatatatcgtcattgatgaattacatacgtaccggggcgtattcggcagccatgtggcgaacgtcatccgccgtttaatgagaatctgcgctttttacggaagcaagccgtcatttatctgcacatccgccacaatcgccaatccgagggaattggcggagcagctgacgggaaaatcagtgcgcctgattgacgataacggcgccccggccggaagaaagcactttgctttttacaatcctccgattgtaaataaaccgctgcatattcgaaaaagcgccaccgtggaagtgaacgaacttgccaaaacttttttaaaaaataagatccagacgattgtttttgccagaagccgtgtccgggttgaaattattttaagccacattcaggagatcgtaaaaaaagaaatcggcgcgaagtctgtcagaggttatcgcggcggatatcttccgaaagaaagaagagaaatagagcgggggttaagagacggcagcattctcggcgttgtcagcacaaacgcgctggagctcggcgttgatatcggccagcttcaggtctgcgtgatgacggggtacccgggcagtgtcgcgagcgcatggcagcaggcgggccgggccgggcggcggcagggagaggcgcttatcgtgatggtggcgaactctgatccgattgaccaatatattgtgcgccatcctgattatttctttaaacgctcgcctgaatctgcaaggattaatcccgataatctcattatactggtcgatcacctgaaatgcgccgcatatgagctgcctttcagagccgatgaaacattcggagaaaatgatgcaagagatattctcgagtatttagaagaagaaggggtgcttcacgaaaaccgcgaacgctatcactgggcgagcgaatcttttcccgcctccaacatcagtctccgttcggcgtcacaggaaaacgtggtcatcgttgaccggtcagagacggctgatgtaaaaatcatcggagaaatggaccgcttcagcgcgatgacgcttcttcatgatgaagcgatttatcttcatgaaggggtgcagtatcaggttgaaaagcttgattgggatcataaaaaagcgtacgtgcgaaaggtcgatgtcgaatattatacagatgccaatttagcggtgcagctgaaagtgctggacattgacagaacggacagcagaaagaaaacggccttacatttcggcgatgtaaccgtgaacgctcttccgacaatatttaaaaaaattaaaatgacgacatttgaaaatataggatcagggccgattcatcttccagaagaagaactgcataccagtgctgcctggcttgaattgaaaaagacggattcggagatcggcgaaaaaacgcttgaacagctgcttttaggcattgcccacgtcctgcagcatatcgtgcctgtatacgtcatgtgcgaccgaaatgacgtgcatgtcgtgccgcaaatcaaagccgcacataccggacttccgacaatctttctgtatgatcattatccgggcggaatcggacttgctgatgaagtatataagcgatttgatgaaatcaatgaaggggctgagcgcctgatcagacaatgtccatgtcaagacggatgtccttcctgcatcggctccgaaatagaaggaatagatgcaaagaaagcgatactccggctcttgaattacgtgtaaaagaaaagggggacgaaagatgtccttgaaaaataaattaaagcggatgaaaaaccacctgaatgtgccggaagctgaaaaaaagccggcagcttcacaactttcggtcccggatattcaagtcccatttagagaagaatgggaggcattcggagtgaagcctttcttttttgaggatgaatactgtcttatccgcgaaaccgtctatccgctttcgcaccgccacggacggtacagcttcagtgaacttgatgacgtcatggcattatggaataaaggcggtttgacacatactttatcagcagaaggatacgaaaaaagccagctgttcttctttgatactgaaacgaccggcctcggcggcggggccggcaatatgatctttttgcttggtcatgcaagagtgtatgaagaccgtgtcgcggttaaacagcatctgcttcctaaaccgggaaacgagacggctctttacaaaagctttttaagtgaggttgacattacgtctcttgttacgtataacggaaaagcctttgactggccgcaggtaaaaactaggcatacattgctgcgggacaggcttccgaaacttcctgacttcggtcactttgatcttctgcacggggcgagacggctttggaaacataaattagagcgtgtatcgctttcggcggttgaaaatgaagagcttgcttttaaaagggacgaagacacacctggttatttggcgccgatgctgtattttcaatttttaaaggcggaggaaccggctcttttaaagggagtgctctcgcataatgaacaagatgtgctttccctcatcgctctttacatccatatgtcaaaaaagatttttgcatcttctgatcagacgtcagaacgtcaggaagcatacgccatggcgaaatggtttatcgctcataaagaaaccgatcgggctgtttcacagctggaagcgctgcaaggcaaagcctttgaagattcggatcgggccctttttgacttagcaatgctttataaaaaacaaaaccgcaggcaagacgccgtgcccctttgggagaaactgacgggctctgatctttacatatgcagacaccaatcagcggtagagctggcgatctattttgagcatcacgcaaaagattataaaaaagccctgcaggccgctcagcaggcggcaaacgacggggaaatatcggaaaaagaagccgagaagctccatgtgagaattgcccggcttaagaggaaatattcctcttgaaatattgcccgggaaagcgcaaaagccgagctgtttcgccaaaaatatttttttctgaatccgcatcgattttgttgtagaatggtgccgcatcttgtaaaatagcgttagttatttataggggagagttggtatgtataaaggtgttttttacttgttctttgtcgtggtttttttgattgcgtttgtattttcgaattttaaagacagcttgctgacgcacttttaaattgggtgattgaattagaacatgcaccctcttttcttcataacctaacagtgtaataaaagttaatggagaggggatttagcatgtttcatcatcattgttgcagaccaaacgtgatgccgccgattgtccatccgactcattgctgtgaacaccattgtttttctaacacagttgtgccgcatattcatccgcaacatacaactaacgtaaatcaccacaactttgagcacgttcattactatccgcacactttttcaaatgttgacccgacaactcaccagcattttcagtgcggaagcccttgctgcgatcattagtattgaacgcttaagcaagatcggttaggatatcagcaaatcaaaatggggcccgatggggagccccattttttaagcaggtgatcaattgaaagtattagccgtaacaggatacaagccgtttgaactcgggatttttaaacaggatgaccgggcgcttgtttatataaaaaaggcgatagaaaccagactcagaagctttattgacgaaggcttggaatggattctcatatccggacagctggggactgagctttgggcggcagaaacggcgtacgatctcagagaagagtatccggaattaaaggttgccgttatcacgcctttctacggccaggaggaaaagtggaaggagccgaataaagaaatgtatgaagcggtgcttgctcaggcagattatgaggagagcctgacgcatcggccgtacgaaagtccgctccaattccggcagaaaaacgcgttctttattgaaaagtcagatgcgcttttgcttttatatgatcctgaaatggaaggatcgccgaaatatatgctgcagcaggcagaaaaacgccgtgaaacagacggatatccgatttatttgattacgatggatgatctccgtgccgccgttgaagaagaagatttctttacataacacgtcagagaatatttgacaacgggacgtgtttctgaataaaatataacatgatgattcacgatatgaggtgaaaaagatgcttgctgataaagtaaagctttctgcgaaagacattttggaaaaagaatttaaaacaggcgttagaggttacagacaagaagacgttgacaaatttttagatatgattattaaggattatgaaacctttcatcaagaaattgaagaattgcagcaagaaaatctgcagctgaaaaaacagcttgaagaagcaagcaaaaaacagccggtgcagtccaatacgaccaactttgacattctgaaaaggctgtccaaccttgagaaacatgtattcggcagcaaactttatgacgaatagggcagatgcacttgtcaaatgagacaagttgctttataatgaacaagtgttcttaacgttcgggtaatcgctgcagatctttgaatctgtagaggaaagtccatgctcgcacggtgctgagatgcccgtagtgttcgtgcctagcgaagaaataagctagggcagccttgataggctgacggcaggaaaaaagcctacgtctccggatatggctgagtatccttgaaagtgccacagtgacgaagtctcatcagaaatggtgagagtggaacgcggtaaacccctcgagcgagaaacccaaattttggtaggggaaccttcttgaaggaactgaacagatagaaggacagaatactttctgtagatagatgattgccgcctgagtacgaggtgatgagccgattgcagtacgacggaacaaaacatggcttacagaacgttaaacattattgatatgacaaattagagctctcctttaaaggggagcttttatcttgaatgaaacgaaagcttaaaagagacagggtgatacgatgaagaagtacacactaatagcgacggcgccgatgggaatcgaagcgatcgtcgccaaagaagtgcgtgatttaggttatgaatgcaaagtagacaacggaaaagtcatttttgaaggagatgcgcttgcgatctgccgcgctaacttatggctgcggacggctgaccgcattaaagtacaggtcgccgagtttcaggcgaaaacgtttgatgagctgtttgaaaaaacaaaagcgattgactggcgcgcgtacattccggaaaacgcaaagttccccgttatcggaaaatccgtgaaatcactgcttgccagtgtgcctgactgccagcggatcgtcaaaaaggcgatagcggaaaagctgaaactgcaatcaggaaaacaaaatgaatggattgaagaaacgggccccgagtataaggtggagatttcccttttaaaagataaagccgtgcttacactggattcatcaggaacaggccttcacaaacggggatacagggttgatcagggaggagctccgattaaagagacgctcgctgccgcgttaattcagttaaccaactggacgcctgaccgtccgttcgtcgatccgttctgcggttccggcacgatcgccattgaagccgctttaatcggacaaaacattgctcccggttttaaccgtgattttgtttcagaagactgggaatggatcggaaaagaactgtgggacaaggcgcgtcttgaagtggaagaaaaggcgaactatgatcagccgctgcagatctttgccagtgacgtggatcaccggatggtaaacatcgccaaagaaaacgcagaagaagcgggactcggtgacctgatcgaatgcaagcaaatgcgggtgcaggattttacgacgaaactcgaatacggcgtaatcgtcggaaaccctccgtacggcgaacggctcggcgaaaaaagggaagtcgagcagatgtataaagaaatgggccgggcatttgaatctcttgatacatggtctgtctacatgttgacgtcaaatgaacaatttgaagaggtctacggaagaaaagcaaccaaaaaacggaagctctttaacggttttatcaaaacggattattatcagtactgggctaaagtgcggccgcaacggaaaaagccgcaacaaagagaagacgcctgaaacagcgtcttctccggcatctttacgttttattctgccattaccagcggtgcgcttttgcgttgctccgtaaaataatgttggtctgggacatttcggtgtggccgttcacttgcgatttagagcgtttcggccgcgtccaattgtgatgaaacaattcagaatgctgatctaatcgatctttataactcatgtaaccatcactcccggatagaataattttgtgaagatggatattcgatcgaatatctgttgtagtttgtgcaggtcaggtgcggatcattcagaatggcatgtatagaaagtgaagcatcggcatagaatgatgattatttctatttgagaggtgatctattttatgctgaacagcgagcacttcagtaaaatacaaaaggcgttagacgcaactgctttccggctggaggaagccggagcggagttcggtccttccgccatgacacacgcacaggaagaacttgaaaatgcggtaaaacatacacattcaacagaccatccgttcctatgtacacatatcattaaccggaaatgataatggcaaaaacttggcgaggccaagtttttttgttgtattgaaaagggttaaatgatattatagatggtctgaatgccgaatagttaggggttggagttgggtgacaacatcacgtttgccttttgctttaacaaaagaaaagaatttttacgaagaattgaacaattggattggtgacgtgttttacgatatccttcccgagaaaggctttgaccttcgggatgagcaggtatttatggcgtttcagcttgaacgggcatttaaagagaaaaaagtcatgttcgctgaggcaggagtcggtacggggaaaacgctggtgtatctgctgtttgccatcagctatgccagatatacgggtaaaccggccattatcgcatgtgccgatgaaacgttaattgaacagcttgtcaaaaaagaaggcgacatttccaagctgacagaacatttggatctgcagattgatacacggctgtccaaatcccatgagcagtatctgtgtctgaaaaagcttgagaaaacgatgcagcgttctgatgatgaaaagtggctggatctttatgagtcgctgccttcattcgtacacgaatcacaagcgatgcagcgcttttatccgtacggcgaccgcaaacagtacgctgatttgacgaatgaagagtgggcaggcgtcagctatgattccttccaagattgtttaacttgtgatatgagacatagatgcggtttaacactttcgagagatcattacagaaaatcaacggatctgattgtttgctcccatgatttctacatggagcatgtatggacggaagaatcacgcaaaagggaaggacagctgccgcttttgccggatcacagcgccgtcgtgtttgatgaaggacatctgctggaattcgccgcgcaaaaagcgttaacgtatcgtgtgaagcagtcgacgcttgagctgtttttagagcgtctgcttcaaaatgatatcagagaggaattcgccgaactgattgaagatgcccttgccgcaaacgatgagtttttctatgtgctgtcagaggaatcgaaggaaatcgcaggctctcaccgattggacatccaaaacgaccagcgtgttaagcgtgcggctgacgaactgtgccgtctgctcgataaaatcggcgaggcgctcgtatttgaatcggaaatgtatacgatcgataagtacgagctgtcagttgtagaagaatacgtcgaacaaatggcatattcgctgtcgctgtatcaaaaggatgccatcagctggcttgaaacgcgggatacagactcaacgtttgtcgttatgccgagaacagtagccgaagttttgggagaaaaggtcttttctaaaaagatcccttatattttctcatcggccactctttctgagggcggttcatttgattatatcgctgacagcctaggaatccgtgatcctttatcattcaccgttgaatctccgtacgattacgaggagcaaatgtctgttgcgcttcacggtgacatgacgtctgagcagaaaacagccgaaacgattgaaaccattaagaagaatgaaggacgcaccctcgttcttttcccttcctttgaagacatgaaggaatttaaagaacaggctgccgcgtgggagctgccgtatccgatatactacgaaggtgatgaagagatcagcagtctggtcgaaaaattccagcgtgatgaagaatccgtgctttgttccgtccacttatgggaaggtcttgacattcccggtgactcgctccggaatgtgaccatttgggcattgccatatccgcctcatgatcccgtgtttaccgcaaagcggaacggagcgaaaaaagatccgtttgaggaagttgatctgccgtacatgctcttaagagtccggcagggaatcggccgcctcatccgttctaatcaggacagcggaaccatatccatttatgcgggcggagaaagtgaacgggtcttggccgaagtcaaaaaggttttgcctgttacaccgaaaatcgtataaaaacaacagctgcaggattcttatcctgcggcttttttaaatctgggaagttgactttatcacggcgttccattagcctgtaattgatagtgaaaagggaggggaacggatatggatttacatacatatgaaaaagagttttttgatctgttaaaaagggtgtcccactatgaagaagccattgcgcttatgcactgggacttaagaacgggagccccgaaaaaaggctctgatgaccgggcggaaagcatcggacagctgtcggctgacgtttttcaaatccagacatccgaccggatgaaagagctgatcgacatccttctcgcgcatgcagaggagctctctgaagatacagtgaaagcggcggaacttgcgaaaaaagattatgatcataataaaaaaattcctgaagatgagtataaagaatatgtcattttaacatcgaaagcggaaacggcttgggaggatgcaaaggcggcctctgatttctctatgtttgctccgtaccttgagaagctgattgattttaataagcggtttatttcgtattggggctatgaagatcatccatacaacgcattgctcgatattttcgaaccgggtgttacggtaaaggtgctggatcagctgttttctgaattgaaggaagcgattattccgcttatcaaaaaagtgacggaatccggcaataaaccggacacttcctttataacgaaaacgttttcgaaagaacaacaaagagccctctccttgtatttcttaaaagagttcgggtatgattttgacggcggccgcctggacgagacggtgcatccgtttgcgacgacaatcaaccggggcgatgtgcgggtgacgaccagatatgacgaaaacgatttccgcacggcaattttcggaacgattcatgaatgcgggcatgcgatctacgagcagaatattgacgaagcgttgagcggaacgaacttatctgacggtgcatccatgggaattcatgaatcccaatcattattttatgaaaactttatcgccagaaatcaacatttctggaccgcctattatgaaaaaatggttgaggcttcgcctgatcaatttcaagatgtgaaaagagaggactttgtacgcgccgtaaatgaggcgaaaccgacatttatccgaattgaagccgatgagctgacatatccgcttcatattattatccgttatgaaattgaaaaagcgattttcagcaatgaagtgacagtggaagaactgcctgcattgtggaatcaaaaatatcatgattatttaggcattacgccgccatctgacgcaaaaggcattttgcaggacgtacattgggcgggcggcgatttcggctatttcccttcctatgcgctcggatatatgtatgcggcacagctgaagcataccatgcttgacgatctgcctgaatttgaccaattaatagaacggggcgattttgagccgatcaaacaatggctgacagaaaaggttcatcagcacggaagacgcaaaatgccgcttgacatcataaaagatgcaacgggagaagagctgaacgttcaatatctcattgagtatctcgtcggcaaatattcaaatttatatttataaacgaaacgcccggtatacaccgggtgtttttctaaaaattctaaaaacacgaataatcgaaaacaaattctttgtaaaagttcggaaatattcaaatttcactatgcaaaagaagtgtatcttgttataatttgattaatatcatacgaacactcatataatcgcgtggatatggcacgcaagtttctaccggtcaccgtaaatgtccgactatgagtgagcaatgggacggcttttattcggccgttgcgtgtagatcattcggcattgcttgctctttttttggagagcgggcaatgctttttttatttttttataagcgggggtaatcattgtggaagcattaaaacgaaaaatagcagaagacggaattgttctttctgatcaagtgctgaaagtggattcttttttaaaccatcaaattgatccggttctcatgcagcagatcggccgggaatttgcgcgccgttttgaaaaagacgagataaccaaaatcgtcacaattgaatcttcgggcattgcccctgcggtgatggccggccttgaactcggcgttcccgtcatctttgcgagaaaaaggaagtctctcacattaacggatgatctgctgacggcatccgtctattcatttacgaaaaaaacagaaagtcagattgctgtctccggaaatcatctgtcgaaagaagaccgcgtgttaatcattgacgactttttagcgaacggacaggcggcagaaggacttttatccatcgtaaaacaagcaggcgcagcggtttgcgggatcggaatcgtcattgaaaagtcatttcagccgggaagagatgagctggtgaaaaaaggatgccgggtcgaatcactggcgagaattcaatcgcttgaagacggaaaagtgacatttgtacaggaggtccgttcatgaaaaacggctatgccaaaacactttccctcggtatccaacacgtgcttgccatgtatgccggcgccgtcgtcgttcctttaattgtaggagcggcattgggactgaacgcagaacagctgacatatctcgtatcaattgacatttttatgtgcggggcggctacgctgcttcaagtatggaggaataaatgtttcggcatcggcttgcctgttgtgctcggctgtacgttcaccgcggtagcgccgattatttccatcggtaaggagtacgggatttcagccatttacggaagcattttggcatcgggtctgcttgtcattctgctgtcgtttttcttcggcaagctcgtatcctttttcccgcctgtcgtaaccggatctgtcgtaagagttattgattgagtacgacataaacctagttatagtagaccttgatattcaaattcttcgtaccatctcccaaatcctcgaccgtataggttacatgactaatgagcatctttagtattaagtttatctcagagttagacatcccgtaagtagactcaatcatctcctgcactttatgatggctccatttttctttttttgtctcagcgctaagagcgttttgaaattcagtagatgcaattaattctgctaagtcattttcagctttttgaagtgtttcttgtgaaattttcagcttttctttgtactctgttttactgatgtctccatctaagtacatttcttttatgcgttctattcttccttttgcctttttaacagctttttctcttaaaccaataagctgagttgtgtaagagtcatcgttaacatcttgctcagtgggggagaagagagcttcattgtatttttttatttccttcataattgactggaacaatacctcttcatgaattccttttgtttgttcgcattcttttgttctttcagcagattttcgtaaacactttctaacgtgtttttttctgcctttgggctgttctatagcttgagctttatgacaataaggacatctaacaataccagaaagcctgtgggtattcatatttagacgtctaccagccaatttatatgttctaagtttttctattctattcaggattagtgcatgctcttcatcagttttcatggtttcatgatgaccttttgcaattaatacttcatctaaatttttattttgaacaatactgttgttgcttttgcttttcttgtatttgccaaaccatacataacccctatgaaaatcattagagagaatctcagaaacaacttctccgtaccaaatagaacggccggatggggaagggactttcagttcgtttaacatctcagcaattactgtacaagaatgttcctcttctaagaaccatttaatcatcattctatatatttttttcttttcctcaacaactactgcagctttgagattcttgtcccacttataaccgtatggaactgaccctgaatgcagtctgccttctcttgtggcatttttctttccattaatcgttctccgttttattgctctatattcacttcgagcaataattgattcaaactcagaaagcatttcgtcgccttcgattgataaatcataggtttttttgggtgtaataaacaatgtcccactttgcttaaatgcttcaagtatccgtccggaatcaatttgtgaccctctagagagtctgtccattgctacagcacaaactgcgtcaaactcgccattttcaattctgggcaacaacattgagaacattggtcgttcatcaatagtctcacctgagacaacttcctcaaaccactgaacatttttaaagttctctctttttatgagatattctaactcatttctatgtttggcgagcgtatcttctgaatctctgtcttctctggattttcttgagtaaactgctatttttgaattttcgtgtaacgccaagtatttcatcctttcttcttattgtaagtgtagttagattatatcatgcgcattggaatttctttataaaatcctcattttaacgaaacatttttaggtcagcttgcttattaatctaatttaaagtattctaattgatgtatcataggggtttaacagccactatagaccacagagtccctcacagcgctctgtggttttttatttagatagaatatacccaaataaaaaagaagcctcagagggcttcaaaatgattaattcttctcacatgcaaagttatcattgtcgcgatccattttagatgtataggcagggtgagtgcttggtacaccatgtggatatttctttctcaactctgtacagtttgcaaagtgttctgttcctccagtagaaggggaggcttgtgtagagttagaagagctgcttgatgctgaactacttgaatgtgaactgtttgagctcgatttatgtgtctcggattggtgtgttgtaactgacttttgagccggcttagatacacttactgatttcttcggcttcgttacgcagccattaaatcctttatcagtcgcatatccattcttactccaaatcttcaagtctttatctttcgcagcttgctcatctttcttatacgtgtctaaatacttcgtgtttggctcatacacataagctactcgtgctaatccttctttaagaagtgtttcttgaacagatttaccgtctacataaacgtaagccagcattctgccatacttgtctgtacgatctcctttatcaaactccagttgaagtttgccgttattgactagctgcttgtttcttgctgaagcatcctcaccatatggttgcacacaagagtttggctttttagtttcaggagtgtcaaccagcaaataacgaactgttttgatttcgcctttatagttaactttaattgtgtctccgtcaactgttctgttaagcgttacatcgaccagctttttcttattttcagatttctttttatccgacgaatccttctttgaagcattttcggctttttcattcttgtcattattgcttttgtcgtttgcttgggtgtctgcctttgtctcttttgcattcttttcttcttgctgcgttgttttagctttatctgaatctgttttatctgtagaagcagaatcagacccacacgcagccaaagaaaagcttagagataatgcggcaatacctaacaaccatttcttcattgtaattcccccaaatttgtttgttctgtctctatatcggacaaaccttcctaattataaatataaagccaaagattgtaaatttgattttgtcattttaaaacactcaaataaagttgtgtggtaaaatttagtggtctaaaccttagaggagggaaagttatatggaagaagggaagttaattcaaatgactcttaatggaataaaggaagctgtttctaaatacggaacattccctatgtttcatcatggagggtatgtcatggaagatgctacttttcatttcaaagatcctgctagtcctcaagaaattagcgatatagaacagaagctaggtgttaccttccctaatgactataaagagtttttgttacagcacaatgggatggaaatgtttgatgggattgaaatacttagcttagagggaatcattgaatataatgaggttcaagatttcccagagggatacgttttaattggatatcattttgatggaagatatgtcatagacacaaacaaatcaaaaaatggattaggttatatgctatatctagactcaattgatgatattgaagatgcgattaacttaaattcgaattttgaaatatggtttgacatgttggtgtcatcaaatggagctaaatactgggaagtgaagccgaaaatccaagagtattataaatatatttcagaatagaaaatttagataagattaagtgggaaggagccagatatgaaagtattcgaagcagcctcgttcatttcagccgcagaaaagcgggcaaaacaatacgatcagattagagaacaatttatcaatctcagaaaagcgtttcagggaatggctgacttagacgacagtgagttttcaggcaaaggcgccgacaacattaaagcattctttcaagaccacgccggcgtcacagacagctggcttgatctgatcgatatgaagattgcgtttcttaacagtatttcaggaaaagtagctgatgcaggattagtcaattcgtttgtggaagagtcatttttagaacatgagttgattcatgcgaataataaatcaaaagccatcatgcaagagcagcggaatgaaatgagggatattcttaatgagataagcgatattgtttatcttgatgttttctcgacagaggatgtcgatcaaaaactggattcagcagataagaaacgggacaataccatacacaagctcggaaagctcgatcatgatctaacgaaggaatacgcagaaaccgaagcgaacgagcatttcatccaagccgactttcaacaactccaaaatgccacgggtaaagggaaaaacgcaacaccacttcactataacgccaaggcgtacagagaaagtgacatacataagaaaaaaggcgagattgcaagacattcggatgcttatttgacgattaaaaaagaagaagcgaaagagcgggaaatcaaggatctaaagaaaaagctggctgatggtgtcactgatcctgatgaatacttagagattgcgaagaaaatcggttacgagaaccttgaaccttcccagcagcaatatgtcattcagcttgaacaagcaaaacagatggaagaagccggagaagtgacttgggatattttaaaaggagccggcgttggtttatatgacgttgggaaagatacggtaaccggcttatggcagctgatcagcaagcctgatgaagttgttgagggtatcgtaggggcagttgctcatccgattaacacgtataatgccatttctacagctattgaggaatcgtatcaaaaggatatggtaaatggagatgcgtattccaggtcaagatgggtgacatatgcgataggtacagtagttacctctgtagtaggcacaaagggagccggttcacttacaaaagcagatgtagctggaaaagtcacctctaaagtcagcaaagcaggccaaaagctgaaagatgcctcaattgctgatttattgccttataatccacgttacgatgttgttccagctggaggagttccttataatgtagttaacagtggaggattgaaagacagtatattaaactttgccaaaaaacaaaacagtatcttcggcacttccccgactggtagaaggctcccagtacccaaagtacctcctataactgttaaatacggagaacattatgcgaaatggtcgagaagaaagacactaaaacccaatgttatttataaaacaaaagaaggctattcctataaaaccgacaactatggcagaattacaaatgttgatgctgatttgcaattaggtgagggaaaaagaaatcaatatgctcagtccaatgtaggtaagcctcaagatagattaccagatgatgatggaggtcatttgattggcagtcaatttaaaggatcaggagaaattgataatctaatagcccaaaacagtcaagttaaccgttctggtggggaatggtacaaaatggagactgaatgggcaaatgcattaaaagaagaacctccaagaaaagttaaagtgaaaatttcacctgtttataaaggagattcactaaggccagattcttttgagataatgtaccatattgaaggaaaagggttttatgaaaaaattataaaaaataaacctggaggttgagcacgttggagacaaaactaaacaatctatataaagagattgcagaaacaataaatgaaatgatccccgagcaatgggaaaagttttggttttatgcacaagtttcggaaacaggaggaggaacttatttttattacaatactcctgacgagccacaaaattacaagtatagcttagaagtaccttttattttcacaattgatgaagatgaatttactgagaaaaagagaaagttgtttgatctgagtgagaagctgcgagaagtattcaaggagaacgatcaagaattatggtattcgtttacgctaagccttgaaagaacaggcaaattaaatatcagttttgattacactgattggttcagcactgattacagcttcagtgatcaacacatcatttggaaacataagtatctaggtgaggaaccgtctgatgcgtctctaaaagggataattgagaaatataaagctgattatcctgaaaacccgatctaagtggggattttggaatgagtatacacgatatcactgaaaagatgaacaaatttaatttaaagtattacgcatcaagggatgaacaagaaagcaaaagaaaaatcaaagcatttgaaaacgaattaaacataaatcttgatgaggtgtacaaagaattcgttgtaagatatggcggaagcacgatacaagcagataatgttttatttccaagcttagaagagaatccattggctagtaataattatttaagattagggctattttattggtttgggataggcgatactgactttgatgtcaaatcaatgacagttacttataaagaacaaatgccagattggattatcccgattgctgatgctgatggaggagatcaaatttgtcttggtgtgaaaggagaagcagcaggaaaagtttatttttgggatcatgaattgacaaatggagtaaaagacacatttttggtcgcaaactctttctctgacttcattcaaagtctgtttatagaagaggcaacagatggggacgatgaagacgatggtattttatctattgagctagatgatgatttattaaacagttaagcaaaaatattgcaattgtgacgaggtagcctggaacagggattctcaatcaaagttgaagtggtttattccataaagcaatagtattgcaaataccatttttatgtggttataattagtgtaggtaatacagttatatgattatttgtgcattttgatttgtggaaatgcataaaataaaaagaccagggtgctaccaacaccccggctttgtacaaaaagctgcccatcaaagggcttgctcagcagttgttcatgatagacctaacccttcaggtttccaggctcaagggaggtctattttttatttatatacgtcaacagggcgattataaacgacccgaatgcaagcattaacattaatgcctgaaatgttgacataagcatcaccccctttcgtaggggatgagcaaggctcccttgagtgagcatgctttaatgtacaggaatcattatacactaattccaaatatatgtctgtgattatcggagccttattgccaatagacaagttataatgtagtacttttctttttggaatttgtgttataagatatattaagattttcaacaagagaggaaatttatcatgaagaaagaaattttgctaattcataatggctcaagcattacatatgcagacccacatgaagctgctaggagttatgctaaagctgtcattgatggggtaaatcctaatgaaatagaactatatactgacattgccgtaaatcttaaagaccaagctaaactgatgaaacgatttaaccaggaactatctaagattgtaaatacaagaattcctatgattgaaaaaaacacaaaagagctaagcaatgaaatggaaaattcacatcaaatttatattggaatttcaaaagaaagtataaaaagaaaaaggatcagaaagaccaaaataagcagagcatgactaaaggagaatctggcgttggaatttactttagctaaacaggttttaaagttttcattaacaagtggcaaaagggcagaaataaatgtgccaccaatgctcaataaacaagacattaagatattaaaaagccaattaagtgttatggagatgcaaacaaaaatatctaatgaagatatgaaaagaaaaaggattagaaaaacgaaaataagcaggctataaaaaacagcccttcatttgcgtgatccgaaaggaaaacaatgcttcatgccgtgaaaataaattactatgtccccccttacaagcatacattgtgatatgtaagggggatttttcttgcctagataccggagagctcttcgcaagagagggcctttgccttttcgatatgtgcttcttctgtcgtttgctttttttatgatatcgacggtcatcagcctttggatgatcaactcctcaatcaaaccggtgctgatgaacatcggagaaatggaaaccaaacgggtggcgacagaggtcattacagaatccatagaagaatacatgtctcacagtgacaatgtgaaagatatggtcgatatgaaaacggatgaaaacggaaaagtcacaacgatggattttaatacacaaatggtcaacagtatgaaggcgaaagtgacaaagcagcttcaggctcatctgaaggaagtggagtcgaacaataagcagcatgaaacggaaaaaggcgcgaaaacggccgatgaaattatgatcgatattcccttagggcaggtcacgggaaacagcattctcgggaatctcgggccgaaaatccccgtgcgctttaacctgatcggtgatgcgttaactgatgtgaaaacaaaaataaagccgtacggcattaataatgccctgatcgatatcagtatttttgtggaaattaaggtaaaggttattatcccgtttgccagtaaaacatcagtcgtgacaaataatataccggtctccattaaagcgattcaaggagaggtgccacagttttataacggaagcggcgggtcaggtgtaacgccttccattcagctaccgaatgaaaaacaagagaaatccggagccgataaagacaaataaagacacacagccgcaatctttttaggcggctgtttttacttttcctgcggatttattgaaactgaactcaagtatcgactagtagagcagctcataaggttagtggacacttgatgaatagtcatttccaacaattacatcgaactattgttcttatttatattgaataaagaacgtttgttctgttaatattagatcaataaaggagtgattcaaaatgcttagagatcgaggagcaatcaaatggacttccatgatgcttccagaacatttaacgcaactaaaacaggacttgttagatgtttcgaaaatggagaagccatctttagatgaacaacaaattgaggagattgacatcttggtttctgaagcaatggcgctgaataaagaactaaagtttaagctctttaaagaaggagttgccgaggatttaattggtacagttcaatatctcaattatgaacaacacaaattacatgtaaaagatcatagcgatcaaaccgtatacatcaccatgaatgacatcataggagttgcttacaatgattgattactcacagtttccacgtaaaaatatactttgtgtagatatgaaatccttttatgcttcggtttcagctgtaacaatgggattgaatccaatgacatgttatctcgctgtagttggaaacacggatagacagggaagtgttgtcttagcagcatctcctgcacttaaaaaagattatggaatcaagactggttcccggttatttgagattccagatgatccgagaattcacatagtaaacccgcaaatgaaacttttcatcagagtttcaactgagatcactaaattgttttacaggttcgttcctgaaacatgtgtgcacacgtactcaattgatgaatcttttttagatgcaggaaaagaaaatcctgaagtcatggcagaagcaattcagagcagtatgaagagagagttcggcttagtttgtactgttggtattggtgacaatatgctactgagtaagttagctcttgatttagagagcaagaaaacaaagaatgggatagcacgatggaggtacgaagatgttccgaaaaaactttggcgtgttcatccgttatctgaaatgtggggaataggagggaggatggagaggaatttaaacaggatggggatttcaactgttggtcaattagctaattatccattagagctgcttgaaaaacgattcggcattatgggcaatcagctttattatcatgctcatggaatcgacctttctgaaattggagctcctttgatgcagggacagattagttacgggaaaagtcagatattacttagagactatacgaagaaagaggatatcaaggcggttctcttggagatttgtgaagaggttgcacggagagcgcgaacgcataataaagtagggcgcacaatcagcttgggaattggttacagtaaagatgagttcggcggtggctttcacagagctaaaacaattgatttacctacaaatatcacaatggatatttatcgaaattgcttgatgttatttgataagttctatacaggcaaaacggtacgaagtgtttcagttactttatctaatattgaagacgatgtgaatcaacaattgagcctgtttgaaaaagataatgagaagagaagaaagcttggatttgttatggacgggataagaaacaaatacggatctaaagcgatcttacgagctgtttcttatacacctggaggcacagctttgcatagagcaggtttgacgggtggacataaatcatgagaacagagagcaactccctctgttctccttacaaagtcattagttttttacgtttcggctctttcagcaaccttgaacgtatcattttgttgttggagataggaagcacccactgttccggcaacgccgaataatagaactgcacagataaatagtttagttttcatattgcttctccccttttgatttgtcttcttgcttcatttgccaaacgataaaattcaactgcaccccaagcatcctgttttccagtgagaaaatctgctacagagacaccatagctttccatgtcagggtatatacttctttctttgaagaactcgaatgttttcctaactaagtctaaatcatagtccaagaaaagtcctttaaccatttttaacttttcaagtaccatttcattgttatgccgttcagccaactgtttggcctgttcataaaatttttttgcgttttcaatgtcattttgccttccctttaagaaggagataacaaataatgttttagcagcgtaatcatgattttccggctcaatgatttgaagtgacttattaaagtgaaaaaatgctttatcaagttcttccatttgattataacataatccaatattaaacagtgctgaacgcatcaaatgtccacgattcttttcacttttgtttagctctactgcttcctgatacgctttgtatgcttgctttaaagcttcatcaaacttcatactgtccaataaattaccaaatatgacgaattgacagcgtaccttttgtaccccgtatgtagggctcccgtcaatagcaggttgctttttaaatatatcgtaagccctcatggcataattcattgaaaaataagtctgtttcatgtggtaatacacttctgacaatttaaaataaaattcagctttttcaacttcaacatcttcgctctcaattgaatccaaatatctctcagcttgtctatagtgattaagggagaatgccaactccttttgtctaaaatagaacatgcccatgaaaaaataatagtaatattcgagcattcctgttaagttttcatggccttcatatgcttttaactcaccataatttttctcaatgttttttatagcgttaggatacatatatgccaacattagcttatgtctaaactcaagtagggagtagtatagtaaaacatcttggttttcttccataatttttatttcctgcataacttctttacgcatttcttctgctctaccgacccaattctttttaatagccacataccaatgattcatctttgttgctactaaatcataaggaatgaccttttcgttctccaagtcctaaacccctttcaaatccattttattatatagttgcattggaggaaagaaatgtaaagggaatttgagtgaaaattaaaaacaaatcaataattcgattatgaacgaaacgaaaaaaataccctcctcgttagagaagggtatatgatcagtttgctgttgcttttagagaagcaagccactcatctaatgttccagagaaaccttgttgaacggctaattcatatgctgattttccatctttaccggcagcaccagtagctcctttagcaccggttgcaccagtatcacctttgtctcccttagcgccagtagctccagtgttgcctttttcaccttttagtgaagctaaccattcctctacagttcctgaaaaaccattgtccactgcaatatcataagcagacttcccagtgacaattgagacattaaccatcggattgaagaaactcatttatgcgcccccaaaaaattatatgttattcctgactcagaaatcttgaagcttgtgataggtgaatcatgagcgtccatttgaaagccttgcccagctcttaaatagataggatcaccaccattgattgatacgtggcattcctgatcattcgaaaagctgaacttatagaaagaatatttaatcgtccaggttgcaggtggggaagggatcacttcatggttagattctgacttctcaagcattggactcccgatatatccagatcctatttgcatgaccaacaatcattcctttcttaattaaaaatgaaaaaaaggggagatgagctcccctgagttattttggttctgtgtattccattgcttgatcactatctgagatacctgtagtggttggatccaccacaattcccatggcagttaaaaatgtcaacagcgcattaaatttctcagtgagatcatcactaaacacagaaatatcgtatccaaaagctgatgcaattgcttgtgcgaataaaagagttgcggagaagattgcaaccaggaatgttttctttttaagtcttactttccagttaattttagtcatgaaattcgctcctgttcattttatttaagcccaaaatgtatgagtaaccaggctgcgacaatagtcgcaattacactgggcagtaccttaaacacaaggtctttagtaaactgagagggatcaattttgcgagtagaatcagagcgttccaatatttcaactcgattgtccagtttttcatatgatttactcagattttttaaactgttgctcatttcgttcagagtgctgaactgttctctcgattgtgcttgagaatccttattaatttcgacttgctgctcaacaagcgtagcaatacgaccaataacatttgttctttcttcaagagagtcaattttgttatcagtgtgcttagctttttcttcaagtgcacttaatcttgaaatggtgctttgctcaaagttatccatttgtcaccaacctttgataaaatagaaaggtgacattacatcacctcctaaaataagaggataatcattgatatatctcgatcaacaatcatcctcaaagatatttaaatatatttagatttttgacccaaattgtcctgagatgtagccgcgtttacctttgtagataacttcccagtaacccttagcattgtttgaccctttcactgagccagaaatgctgagtgtgtcacctagcttcacagtgccgagattcttcgctttgtttttatcgggtctgtccataacgattgcagcgctttgtacaccgacaattttaattttgcctacagatttgataccactgcttttaggcttagaagtggatttaggctttggggttgattgtccaagttcagcatcacttttaatgtatttcacatttacgtaaccgctgtatgtagcacctttagagtttgtatatttgatatatccccaaccattttgagttgatcctttttggtattggacagtggagcctttaggaagagcgagtacaatagaggagtttgcattgcgttgggttctcacattaagactgtcagcgataactgtgtttttaacataagaaccatttgttttaacaacgtttgttggctttgaagatgaggaagaagtatttccgtccagtgctttcaattcagcagcaatagcagctttaacagcattccaacgaccttcatcaagaactcgatgcgggcagtacttgccagaccagtcttgatgctttttaactcgatccacaccccagccacgttctttaaggagttgtgcaataaacttaatagccaacgcttcagcttttctgtagcgctctccacctgatttggagtagcaaacctctacaccaatagaagtacggtttcctgaattcgcacctgatccatcaccagtgtgccatgcgtttcgatttgtaggtaaaccttggacgacctcttcatcatcaacggcgaagtgataagaaacttcattgttgttgccgatcatgtagcgaatttcagcgtctgcagatgcatcattggctgtgttatgaaatgtaatataagaggctgataacgtatacggacacttaatagagtatttgctggttgagacaagattttctcttacttgaatagccatattaaacatctctcctaaaaattaaatttgagcacaaaaaagagagaaggggcaaatcccaatctctctttatctcacgtatgctcttgttatctctgtttttgaatgctgtaaattaaataaaatttatattttaactagaacataaccacctcctttaattttgagggattacttaattaagcagatggcaatgccatagccaagcttgtctgaatatggggttacaatctccatagccttccaagagtaaaacctgtcttctgtttttgtgccgatgccataattaccttcaatacgatctcccacagaaacagtgctgtccactttcacataaacctgtccaagtaagccgactatgttccattcagggcgttcttcacgggggacgtaatctattttttcaatccattcagggtttactttaggcagtttcttaacatcaccggtttctgggttgactacatcttcatatatgtatccaccaaattcattctttaaatatctaccttgccagtgaatatcagctccgcctaaaatagttcctgcagtttcggagattactccgtgtacatcttcaccttttctcgctgggcgaattttagctccttcaagagtgacaattgttcctgtcggaattgcttttccgtcaaggctttcaaaatattcagcgtaatcactgaaagtggctccgccattcatcttgccggtagatgttatatctccgttcatggagtttagcatccatttgatattcgctcttgatggggtagaaccatatccaccaaccaccatatagcgatcatttgtaccgagtttgactcctcccgaagataagatagttcgtgagacattatcgccttcaatgtgggattcgtttgaagacatgactgtgctacgcgaaccgctaacggaacttgctccggaagaggaaaacactcctgttctaacaccagttgcttttgccccaccagtggtgcctataacagcagaagcttcacctgatacttcaggctgtccagtagacgctgctattaagccggtgctagatttgggtactccagaagaggtggcaatccttgtcccgccttttatattatttggtacaaaagtgtaatcaactcctgcaattctggcagcctttttgtatttttccactgaaattcccattaggcttacctgagaattagaacaatatacaccaatactgtcagctttcccgtcgcctatcaaacttgcattaataagctttacattttctgtgccactgccaatacgcacaccgattctcgccgattcaaaacaatttacatttgaaatatttacattatctgatttttgatccccaccgtatacataaatgtcagctccagctgttttgaagttagaaatagagagattgtttaaattgatgtttcttgatttaaattgcgtagcgattgcgggatttcctttgtaatcataagaagggtctccaattgcgttaaagtttgaaatgttgacatttctgtaagctgagattactagtgcccgtgggctcaactctttataaaggtcactaaagattggagacttcgcagtacagttaacaacattaatgtcgaatgcactagtggagattttatcagaagcacgatgaaagccgatgtgtctaaaatcaaatgcacgaatgtcattctctgagtagcagttgattaaatttacgtttcttgctgcaggcgctctattgtgggctttaacttcaaaacctctgcagtttttctgactgttgcagttcaccagccatacgtttctagaaccgtcatcaatttcaaaaccatttgaatttgatgagcctttgtcatgagcagacccattggcattgtatgcgtgacagttagtgaagtagatgtattcagaatagtgagttgtgaagccatcgtcaccgaaattagttgcagtacagttttcaatccaaacatatctactgcccttcggttgataataatcagcaccatctgaagaagtgttccaaataggagagcttacatcaaaaccatgaagaccgggatttcgagcattgacgtttctaacccgaacaaatttagagttaacaatacccacacagtttgcatttgttccatttgtaatggtgttgtcctttttgtctaaattccaatcgaggtctaagtcttcaattaagatatattcatttccgtttgtgtagtcgctattggttaacacacaagatgttccggtagcagttgggtgaagcttgataatagatcctgatccaacaccgtaaagtctgacataagaagggatatgtaatccttgaaccatataaatacctgcgggtacaaaaacttctcgcttcccgctggaaaaagcagctttaaaagcttcagagtcatcagtaaccccgtcacccttagctccaaaatcctgaacattgacacttcgtctgataaattcatttaagactttatcaacaattgttgcaccgggtgctgggatttttgaaatgtctccaatagtgtttgtgatatctgttaaaccagaatcgactgtgcttattacgtttttaatatccttagaagctttatcaaaagcctcttgaatatcgtctgcagtatatctgatattatttgattttaaccctatagcatcaatgggtatccattgctctgtttcttcgtccatataacccattgtgtttacgggaattaaattgtcgctcaatatatactcctccttatccttttctaatccaaaccatacttccgtcagggggttctacagaaggttttatcctcatctttttgggagcattgttcgttctcaaccatactgatctgatgttgtaaggctcaacatagctggaaacaatgttgaaaccatcatacttatctgacacgctaatatttatccagtcgaaaccatcccatcgatattcaatgcctgtttcttttacagtgacagtccaaccaatttgaggggaaggataagtgtttaataaatcctgataggtgtacacaaacggcaagtaaatcttcctagtgttttcaactacatattcataatctgatgttgcttgtctgcaccaatttgttatttcaatacatcgcttggtgacacgttcacattcagcaatacgctcattgatacgaataatggcatcttcagcatcatcaactaagccttgaagcgtttcaatgaccatatttccttgtcgtttaatccaaattcttgaggcagggaagaaggatgcgccttctccttgatatgtaaaagtaagtgatttgccttcatttgaaccattgaaaaagacaactcccataaggtaatcaaccttaaagtagttgtcttctaattcaccattttcaatttctcgccattctttactgtcaccactaacctcgactctgtactcacggttaggtacttctgtaagtaagactcgaccattgtaaacagttaaagtttcactatagcttaaataagggtcatcgattgaacccttccttttttgagaaagggtagggtcgttatagagctgaggaaaatccaaactaaattcaccgtcctttctttatgtgtaattgatttgagcaattcttccaagtgcgcgactctctcttctaaactctgcagtcttttctctctaagcctttttccgtgtactcctaacaattcccatgatcactatatatacaatcgcaataccaacagttacaccctcaatttttataaaaaaactattcaaaattattaataaaaacgctagtactgacgcaaaccagtgtatagattcatattttttgtcactcattgctgatcccctcactctttctgttaaacactttatataccaaaatccatcatgacacaatttctactatgggttcaagtggaaaaatggtttataatttacaaggtatttttaagtaaaaaaggggtattatcgtatgaaaacggacaagtctttgcataaaagaagaattttatttaaaagtcatctgtttagtggaaaaataggggagtaaagactgaggttatcgacgatttcttaatgattgaaaaggaatctaatatataaataaagtgggctttaaaacaaaaagacgtagccaatagcgcctgtttagtttacatggctatatgcttcccatatatacttgatgtttaatttattccctctttgattgctgtctgagcctgttataaatccaaattcgttcatacttccgtatgtagagtttcccccaaccagggatatccccatttcatttacctgatacgtataaccccctgtttcatcaattaatagcatggaatcattagaagacactggccacacttttacatgtgttggagtgaaaggcagcaatatctgtttactaattgttccatcacccacatacgttcctttagccatctgaggaacatcagaggatagcgcatattctgagtgtagtttaccaccaagaaactcagcgtttccatctatggaacctgtaatgattccccggtcattacgtacaggtattgtattaggcgtggatagcgttgaagtcgtgtaaccatttaatgaatcagccgatcccgcagaagacacaatccactcttcgccattaaaaagctcctgtttattagtctttggatcgatccaaatcgttcccgattctggcgcaataggctttgtctctgtagatattgtataaagtccgttaacttttccatcgagacttcctttcacttcaacggaattagaggggaggtaaggattttcgtttggatgaagagattttacaatgtcagatccaataaactgagttatctctatgtctgcatcaactcgtcgataggcttgaatgccaatggtgtagtacatattggaggggagtcctgtaaatgtagcagctcgtttgtcatactttacattcttcaggtcttcacttgccatttttgagccgaaaacatattcttcatttttattgcttccatggagatatatttcaaaaccatcaatattgtattgatcttcgtctgattcaacatagtcccattggaaagttacatcaacagaaccatcatcattggttgtatgagaaatcgcagttccgtcctttgctataataggggaggctggtttaacagcaatcctgtcattgcgtaggttgaagttttcagtaacctcatcgtacttgatttttcttttgtttgtctccgtgctaattttatttgttcgataaactgttttcagcatgttctcaaaatccgatgaagcgcgtttaccgtttgaaactgtaacgctcaagttagactgttcaaaatcaatcgaaatagctgttattgttgcttttacattggtatagaagcttttctgttgtacccttacgatgtcgccaagagaaaacctgtcccaattatgtttttcactaatgcaattgaaaaagttcactaaacctaatgctagattaacagctggtgcatttcggttctcaagttcttcgtttgcaacgtcatataattcattctcatcaaagatactgtcattagaccattcggctgtaataatgtattttgaaagttctttctggagttcagtgctgaagttcttttcaaaagacagtttatctttaagggcggtaatctgtgttgaaatttgtgtaatagaagcttgtattgctttaatttcttctttttttgattcaacttcttttgatttagcatctctttgctttattagatcagtagtatcatcgccggctttacttgcaactgtaatcctgtccaatatcttttggaaatcaagctgtaaagtatataggtcattattcgatgctgtttctttttcctcggctttctttttctcatctaaaagtttgtagaaagaactgccttcattattaaccaggtcgttgtaatctaaaattgcatgacaaagtgcatcagacatgtagttgcttctttggattacatttcgtgtctggtcacgctgaaaagggtagaggaagtacgaaaaatcgtctatgtatgattgtccggttggatttacggagttgatgcttaatccatctttgcctgtagcataaatccttgtaacgacatcatccatatcctcaatgtcatccagagaaatcatatattgggcaggggttattttgagacccttgtatttagacacatcagattctttgtaaaaatcaacagtacagtcaattgtattaaagacaggaattgcttcgaatttctcacaaatcgaatacataaaatcaagcttgtttgaagaagaaatatcaaactgtctgtattttaaattgaagaggggatcaatgaaaccgatagaccattcagtattttttaggcagtcggtagcggcctctttaagatttttcgaagtttcttcatacttaatgacaccttgcttagaaagtacatattgaagtgatttgcattcaacctggatagtgtccatatcattgctgtatgatttggttttcttgactactgtaaaccagattgtaagtccataaaattctgattttattaagtaccaaggcctcagtaaatcaacaatatgattccgtttatttacaccatcgtaagtagcagttaaagggattgagaatgttaattcgtgtacattactgccatgattgagtgttaccataggattgattacttcatcaatatttgcgatctttgttttatttggtttagccagggaaagacgaatatctttaatttccgtgtctttacgaattgtaatcaaatgtctaacccctcctacaaatacttgtatctaaatgaaaatcttaatttacaattgcctgtaacctttaatctgttccttccaaagcccaatctcaagtactggtcattaaaatcgtcatagcgctcattgccataaagattagactcaataatttctttttcgccgtttatttttaagagctccttatttttcaagttgctgaataaaaacggttcgctgaaatcactgagattttcgatttttatgtcaccatcaccaattttcaatatttctaaagaggggaagatgtttacatcgcctttattatgcaactcaacaatttcagtaccagaggatatatcaaatgcatgagtgattgcatttcgactgtaagcgtaaggggagttgcatttcatagttaaccggacgtagccattacgagcggcattatgaactaaatcagctgtatctactggcattgcataataaacgatatcaaggttttggctaaacgcaaaaggcttgtaatcatctacacttaaccaacgtttaattgctcgtacattcttttcatcaaactgatcaccaagataaaaattcaatgggaattgcttaggttcctgtttaacaccttcagtgtagggctcaggccgcccctttacataagtctcattaactgttcttgagcctaaaaacggttcttcgaccaagcctgaatcagtgttaacatttgtgacgccatagtcacttgatttttcgtcattaaataaaaaatagaggctttctctaatcaatttttatcacctcaaaaataagaagagccagcatattaactggctcatgagttgttgaaatttatgcctttgtttttaagaccatttgcaaatttattgaatacaaaatcagctgttttctgaggattccctgattcgttaatggtgaattcaactttaaaatcattgttgtttacagtgccatttactgacttagctgcgtctggtggggaagagaggttttgaatagtcgggatcaaactattagaaagactcgattgattaatattcggaattattgatgggatagttgtgattcctttgttaatcaaggctgctaattttccaccttgcccccatttaggtgtctcttcacttggaatattgttctcacgtacagcttttactgtatctaagatgtttgcagtatcagttttattaaggatgagttctttatcatgaaggaaagcgagtttacctgcgcctagtcctgtacctgtatatccacccgatgcaaaagaggatacctttttcccagttttattacctttggtcacagtattcagggcattggaggcttctttaagcttatcgatcaggttattggagatgcttttccctatggactccatattgctgttaatgaacttagagaattcattcagttgcttagcaatatcggtaattttcccatccattagctttttctcaagatccttaaatccacgctcatcattgacgagatcatcatatttcttgttaattgaatcttcatctttttgaagctgatcttgtaacgattcttttcgtttactgttttcacgatctttaagaaactcatctaatgcttcttgctgttcttgaagttgcttttctaagtctttaacctgtgattttgcttcatctgagtcatcgagagacagtttatttagcttatctttggtttcctgaatagcctgattcttttctttgagctctttttggtatttagcttcatcatcagttttatcaatctcatcaatcaagtcttgcgtagctttttggtgcgcttttaattcaatatcacgcatcttttcgtacatctctttatagatggagacaacttcatcagcaagagatttgtacacatctttgattgatttctttgtgttgtaaagctccagattgtaatccttctgcttatctttccaattttcgatctcctctgtgatttgtttctggatgtcaggaaagccctttgctgctttcttttgtgcttccaactgtttgatatacttcttcgcttcagtctgttgctgctgaataagcttaatctgttggctataatatttaaccttgtctttatcttcctcggtcatggatattttgttgctaacatctttaagcttagattcagttttcttggttgatttctcaataccgttaagcgtttcgtcaactttagattggatgagctgtccctgaagttctcttacttcttcttgaaagttgatgagatcaatcttagcttgttttaattcctcagcaagctgtgctctttgagcagcattcaaagttttgtttgttttgatttctttttcaataaaagaaaccttttgactctgaatcttttgctgttcagttaaagcttttttctgatcgtttgtatacttacggaactctttactgtcgctcagatagtgactagcgagggctttgtctttagcgattcttacatcaaaatcaccaatacgcttgtcatattcatcgagtttcgattgaacgatttcatatctgagttcctgtatctgatcgtttactgaatcaatatcaccttgaagagagagaaggtcggatttagcttgcgctattgcttgttgtcgttctgcttcggcttgggatgcatctgaaatagatgtaccgacaccttttaaatacttctcaggatcaatcgtctttccgttttcctcaatttgaagatgaaggtgatttcctgttgaattacccgtactgccaactttaccaatggtctggccagctttaacagtttgaccggctttaacagaaggggtatcaagcatatgcatatacttagcaacttttccatcatcctgttgaatgacaacccagttaccggcagttttactataaccagcaatttgaacttttccactctgaacggatttaattgcggttccagcttttgctgcgaagtcgatacctttatgtggagttgatcggtaagcgccatcttgcgcattatatttagaacttattctaaacgcactgttcttcgtgtagtagcttgcaatggaggaattagcagaagtcattgacttggtgtaatttgacatgatcttctgaacataattctgagtttccttgaaaggagggacgccgccgtatttgattacattaccaggccctgcgttataagcagcaagtgctttctcaacattgccaccaaatttgcttagttgttgagctaaatatttcgtgccacccataatgctctgataaggatcataaacattgtttacacctaagcttttagcagtggaaggcatcaactgcatcaaaccagcagccccggctccagaacgagcccttgcattgaatcctgattcttgttggattacagctgcaattagagctggatcaacaccgtatttgcttgcggcagaattaatgtagctggagtatttaccggagtaagacccgccaccggaagaataagaaccaccagaagatgaaccagaggaaagggaagaggtaactataccgtattgtgcaatgttccctgacttaatttgatccttgaggagtttggcttgctcctgcataagctttttcttttgttgaagagctttaatttctttctgcagggcatttcgataactttgggaatactttggatagtcgtttacttgcttattatatttttcgacttcagcattaactttctccagagcttccttgtatttatcagccacgtacatagatgttttcatttcctcagaggctttatcacttgaagaagacaggtcatcaagagatgttcctgtttcagatagggaagttgaagccaaatcggccagtttatcaagctctttaagctgatcggtgatatcagtgacctggtttaaatcatcctgtgttttcggtaggaactgtagcgcaccactgttccctttttttagttcgttgtatatctttttcttgttgtcttcaagctcggacttcattttataagcgtcttgaacagtcttgatagccttgacttcagacttatacatattaatctttttgtttaatgcattagcctgattaattagatcttgtcttacagattgttgcatatcattgtaagctttgagttttgtgtcccgaagcttgacaactgcatttctgttgatttttacaacaccattttcaactgaaattgcatcagcaagatcatgttctttctgaataagcttcatggcttctgttgcagatatacttttaccttcagacattttttcaaggaggttgtttaaaggggagatgctgtcagacatagtgtcataagcttcattttgaatagcagatatagcagcatcattttgcttcgattcaactaattcatcgatgattcctttaattgcttcaaaatcacctttagcttctttgagcttgtcagataaattcccgacttgctcacctaatgcatctacaccttcaccattttcatcccaggttactttcgcagtttttgctgaatcatttgtagagtcaatggcagttttaaggtcatcataagataaagccaaaccattagctttatctttgccactcatatattgattaacaagatgttctaagcttttagaggcggaatcaaaattgtttttattgcccgattggagcgctttttggatattttccatgtatttcgaaacatttattgaaaatgactcaagttcatctgcattcattttgctgaagtcaattttatcgaatgcgttagatatttcccttgaaagattcggatttatctttattgagttaaaggcattaattgtctgttgcacttgctctctaattttagcctgtgagctggatagctcttgttcagtacgtagtgcatcttgttcagctttaataccttgattttttttgtcattttcagaagagaaaatatcccaactcttgccgtttttataataatcggcaacctgcttatactgtttaatcttatcattgagtttatcaatgtcttttaagctttccttaaagttactattggcacctgtttgaatgtcttttttgtttaaattactaaggtcttcagtgtactttatagcatccttaagtgcttggtttttctttaagattgcttgtccttgagaatcataaccagcgatcaaattcgggaatgtttgtgctaattgctgtgttacttgcagatattcttgctcctgattggccgataaagccccgccatctttagccttttgcagttctttgtattggctaatcagtttatcagtttcatctttattggttgtaattgcttcaatgctagtagttttagcttgttcaaagtcttccctagcttgttttaattcagaataagaggaaatgagtttctcaataacgacgccaagtccaaccatagctaccattggaagaaaactgcctgctaaaaaagcgcttgtcgagattgcgactttctttagattgctcatcgcaacgcttgaagcattaaccactcgtgtccaaactgcagttttagctgaagctgttgttgcaccaagcccaacagcattaaagtttaagacaagatttttaagggttgatattgcagacattccagttgagatggtagctgtacgaagagaggtgttgaaaagcaggattgcagttgtcgcagaaccaaaaacttgagggaggagcccgactgttttagtaatttgagcacttgtttgcattaatcctttaagtgcatctgcaaaaacaacaatgctattagagatgaaggcttcacttgaggcaaccgacatttctgtaaatgcatttgacagcctgtttaatcttgcctgtaaactgtcagcgtatttctgctgttcactccaagcgcttcctgcggaattagctgcagtagtcgctgcgttttgtgatatggagaaattattcatcaaggcattaaatctagaaagctgataaatgcccgctacacctattgaggtattttgtttttgagcatcactgagggtattccatttgtctgctaactctttaattaaatcagtagcagattttgcctcgccactggcagttttcacagaaataccaatctgttctaaggctttaattgagctattattattcccaatacgtgcgaaaatggttttaagtgagttaccaacaatgtttcctgattcacgggtggtacttgcaattgctgtagtataaccaatcagatcgtttaattcaacgccaaaagtcgaagcggtacttcctgcttttcggattgaattcgctaggtcaagagtagttacagcatagttgttatcgacttcattaagcttatctgcgattgaaatagaatcattcgcagcaatattgaagtttaacattgcggcagttaaagtgttaactgtatcatcaggagttaaatcagagacgttttgtagaacctgagcggttttagtaagcgtagacagttcactttcatcgaaacccatacgcccaaaatcgccagtcatttgcaggatgtcagtgatcttatttgaaagcgtgtcacctaagttgattgactcttgaagaagctcattatacttataatcaggctcattcattacacgtctgatattcgtcattagagtatcaatttcaacagcctgggaaaccatttccttgagcccagatatagcaccatagaacaaagaaccggagatcaaatatgtcgacatgcttttgaaagcttgagttaactctgtgccaaaagaggaggcttgactagacgctgtttgagcatttgaagccaattccctaaattgcatgttcaagctttgcatttgagatctgatattattaccgccggcacttacattaagactatttactgcatttaaataatcttgagcagcttgtctattgccggtacccattgtatcgccgtaacgtgtattaaggttttgtacgtttacctgcgcttgacgttgatacaactcaatagtttttctgagttcattatttttcgccacagcagcagacttatcatcgagcatcttaattctgttttgtaatgcttcaatttgttgtgctgtttgagcagtatttaatttccgtccaagggaagagagggtggtatcagttacaattccttgctgtctaagtttttctaaatccagctttaattgttcaatagcttttcgttgctgatcatagttcgttgttactttagatgtagtagcgtttgtttttggatcagttgtgtaggtaatatcgtcaaagccattgcggttcttttgagtaaccctcgtcgtttgtccttgagcattcttttgttctgttttcttctgtacctgaccaagtttttcagttgcttgagcaagcctgttaacttcttgcgtttgttcacgtaatgattgattgcgattgtctatggtctttgtttcacgctgaatgatttcgccatttttcttatattgttgcgtcaacttttcaacagtgccatcagcatttctggtaatcgttgtagtttctttaactgtttgattgaaggatttaagatgtttttgataagtgtcaactgcagaggagaattcgttgagagtctttaaagcagaggcatcaatattggtctttaaattaagggaattaagctttttctctaaagatttaatttgctgatttaactgttcgacagtttttgaagaagtgtcagctttgggtgtgagtatgatctttaaatcttgactcaaatataggtcacatcctttcgaataggggagagtgatttttagggcatataaaaaagccactcattattgagcgactttgtttgctttccgtattgctatctccataataccttgccatatttcggcatttgataaagcatctttaactttcagatcgtcctgtctaaaccctttaacattctctaggccaaattcatctttactcggtaggaaatcaaatctgtaaataggggaggagaaatcatcgagctttaattttaaatcgatttttttgaagtactttgtttctgtcttattagaagataacccaccaaccaatgctccaatacttcctgctgctaacccaccaacaacagcacctgttatttgacttcctttggacacttttgtaactgtgttatcatcaattgtaacttcagcttgaattattttgctgaaggggacaattctctcttctattgttccatcctgtttgaagctatgaattacaaatttattttctggatcaattaaagtaagctttgcatttttatctggatttatgatggacttataattagaagggaaatttccaaccgtttcaatctcgccagctctttttttgtccatttctttttgcttatccgaagcgctaaccccaataataatgaaagcgccaaccactaaaattagaatgatagcccagatcatccaaccaccaccagtattattttcctacattatatcatgatttccagcagtgtagaaccaacaaaggggacagaaatgaagcattacttcttctctatttcggactttacttgttccaacaggcttctgtattgaatggcgcgtgatcgacaagttctactattatccataccataagtaatgccataaaatatccctacagaaaacataactccaatagaaaccgatgccatggtgggtttaccttcgttagtataagcgaagtagtatacaatataagttacgaataatgtgcttaccgatgttaagcctggtacaatctttgaattatcgaaatactcttcgatatccttcattcttgctatagctaaaattatagtgtcgatatctaagcctcgtattcgttgaagttcagcttttttattagttgaccaatatccaagacggtcactaatgtaagaggctatttctttgttattccatttaaataagacttcttccaaggattttgcttgttttatataaaaggtgttctttttccagaaaggccacacattaaaaatctttacttcaatttgtgaagacggtaaagactctttttcattctttttgtcagccttagcttgttcaagaagggttttaaagtacatagctgttgtcatcactcgtatatctaatataacagcacttagcagtgtgaatacacaaactatcatataaatgaaataaacttcgcttccaattggcagtgtattcataaatataaatttaagtgacccaagtgataaacttaatatacataaaataaacattgtatatttggaatagaaaaaccctgattcaattcgtgccatcttagctattccagaagtgatatctttatcactcagctgttttagatattcaaacttctgccattgttgctcggaattgaggctctcgtttgaaggaaactctttacggataaatctaattagttttcttaattttggtgttgtaatctgagactttacaatttcgataaattccaccaatattcacctcgataatattatcggataaatatggatttttttaagcgattctaagctaaggtttgaacatactatccattaagcgcataaattctatacataagcaaaatccctcaattgaaggattttgattctgcataaaagagggatttcataaagagtgtcgctaaagcaaatcaattgatatgtctcccaacaagcttttcttaatctttccgtattcaagtttaccggtgcttgcattgtaaacaagaactttaccgtcactgatcttggattcatcaatctgtttagatccgaattggttcttatcagctttagtaccaagctgcctagttaattcagcaacagcttcgttcaattcattaatttgctgttgcatattcgcaattgaactttggtgaggattgaagagactcataaggtttacgagaagatttgattcttttcttctttaaaatcacggaggtcgtagtgcttaattgttgtagacacatcattatgctgtgcaacatatttactcacgagctcaatcttaattttcttgacttcaagaaggtaagtaatacaggaggctttaaagaggtgagggttaatgcggcggccgaggatatcagaaagaacatcagaacaaaaatagtcagcccaaccctctgacatttgtcttggttggccaccgtactgtgtagtaaatagatactcatggtcatatccccgttgttcatgccaaagcttcaaatattccagagcttctgtgttaatcatgtagtcgaggggtttcccttcgccttttccttttccaagaactttgtgagccatgacataagattgaccttcaggtatctcataatctaggatttcagttttaaactgaatgatttcagctcttctggcacctacgttgaaggcagtagctaaccaagccatccccaaatagttcttatcttcttcaagcactttcatcattgttctgtattcatcgtaagtaacctttactttttcatacgtggttgttttagggatggcagggagacctcttgtgaagttcctgaatgatttgtaattatcgtcatcttcagcaacaacattttcaatgtagttatttaaagaagatactccagccttttttaaagctattccacttgaagacatccctctatttttaaggaagctttgatatctgatgaaatcccttttggatattttgtaaagcttcttcccattcaaggaattatgcacccaccagaagaactgacgaagagaggagttgtattgcttcctggttttatctcggaatgagtgggcatcaagaaattcttgtgttaagcttctatgctcgtcatcaatctgaccccacatttcatccgtgacttcgggcaacttttcggctctagagcgcatcatgttttgttttatttctctggccattaatacaccaccgttattctgttttaataccacttgcatttaaatcttttttcatagcagcaaccaatcgcccatcttttaacgattcagcggtattcttcataaatgggcgaggttttccataaccataaccgtatttatctggatacgtatatccttgaccagtctcaacaaccgtggcaacatccttaccgttgtcttcacgagtattgtctaatgaaattccgttagattcgttttgaatgacgaaggagtccttcaaaagagacgtacgttcatatgcaagagggtcgtatgtgtcatatacatcagattgcacatgctcttgacccgttttaatcatcgtattttttgtgctggattgcttttgaacggcttgctttgcggcaaattcaattagtgctgctatttcttttatgttcttggccattattcagcctcttgttcattttcaatctcttcgaccttattaaggataagatcatttatttcttcttgagatatgtttgacagtttgtctaaattctcttgcatcatctttgttgcttctctaaatttcttcatgctttcttcagggaaactactaataatcaatgggaaaaattcagagtccacaagcttaacaaaccactttactttgtttttgatatcacttggaatacccaagtctgtaaattctttaattaatgaaaagaatccccattgaacaggattaatatcttcaaacttaattccagcttcttttgcctcttcttgatccgtaattaattcagtaagcattttggttaagcgggtaggggagaagtaagggtaaatataaacatgaacgtcatcagtaagttgcactcgttctttcttgtcatatttgcttacactttcttcgatcaacccaagatttaattttttcgatgccatctcatttcctccttatatatcctctgaactcattaaaaaagacacctcaaaaggggagaggtgtctaaataaaacttgtattttatttataatcttcttttagaactttctctgtataagctgggttatttgtaaatagtccatccactttcaacttaagcattttggatgtgagtgctctttctttatcagcgttaaaaaacacatgtactttcatattgtttttgtggactaaatcaacaaaacctttaccaacaaattttgcattagggccaacaacattagaatatttttttatttcgtttagctttgatttgctcatcggcttaatgtcttcatctttcaaaagttgaacaagaggaacatcactgtttagcttatgtaacttctttagacttttgtcactaaatgactctaaaacaactttgttattagcgattagtttatttttagaaagtatgtcaattaactttttctccattactaattcgcctttgttgtttgttctagtctcgatgtagtagtttgtagtttgtccaaactttttaatgatttcttcaatcgctaagatcttttgtccttttccagtacgcagctttttaatctgatctaatgtaagatcttcaacttcccctttaccgtttgtggttcgatcaacagtcttgtcatggtttgcgactaggtgaccgtctttggtttgtcgtaaatcaatttcaatgtagtctgctttgtcttttattgctcgttcataggagagtagggtgtgttctggctcaatttccgaggcgcctctgtgtgcaatcattagcggctcgtattttttactgcttcctttcccatagcctaaagctgatgaatcaacttcgttaaatgaacatcctcctagtatgactaaagcaatagttaatgttatcaattttatttttttcatgatctaaaattatcataattaggtagttggttcaatatatttctttccaacaatttcttcgtactgttctggtgtaatttttccttttactacagcttgcgctactcgatattcatcccacacgccattaccgtcgttgtaataatcttttataagttcataccaattcatttaaagtacaccatccatcattagttgatatgttaagtcacttaattgttttttaaccttttcagcttccgatggctcggggtcaagtggttttaagctgtcaatgtattctttcgatgctgactcaatccatttttttgttttaggattgaatttgggaatataaagaccatcggatggagctattatagtgcaattatcaggaattggactatcgtcttcaagcacaacaggggattcataaatataattttcgtcatatttgtatacttgcatcataatattctccctacacggccttaaaactaaagccgaaactaatgtaatcattgggtttggaggtatttgtacaactttctataataactcttccttcagtatcaacaagcgttctgtgagtctgaggtattcctgacattcctgcttgggaagctacaccaacccattgaaacgctcttccaggcctgtatccttcaggcaaagtgaatgctgccactccaaaaccaatcgttccttttgctatagctccctctacaaaaacagcccccgttgcatcctttgtataccgagttttaaacactgtttggtctgttgagttaacatctgtgtaattaacccatccattctgtaaagtaggagtgtaccatgttattgaggaaagcttggtatcagtataggttttagctgagttgagtgcagcagtagctcgggtctgtgctccgtcggtcgtttcatgtgtttgccacgtagtccaagttaaatcgcttttcctaaatcggaaataagtatgtgttccgtaatatacttctaaagcaaattgggctactgtatcaccataattcatgacaactaaatagacattggacaagttagcaggggagtgaagaccctggttggcgattaaataaaacccggtggtaatcaaatcgttgtattcggttttttcggaactgtctttgtagattaccttcccatcatcggcggtgagtttgaagagttgagcagcgttccatttatcccgatcagatttgtcgatatggacattagtgtcattcagatgattatcaaagtcacttttagtagcttgttttacattgtctacattctcaagtccaacctgttcagcagtaaccttgtgtgggtttgattgatcgttagtatgttcagctaaaaaagacttcgtcctttcatcggagctgttccaataactgcgctcatcctttgtgatatgtcgatcgaggtctgcattgtgagcgtcaaaatcaaccttcgctgcttgctgtacattatcaaccttagccaagccaacttggcttttagtaactgaatgaggattttccttatcttctaaatgagcatcaaaagcaacttttgcggcttgctcttcattgattacatttgataatccgacttgttcttttgtgacttgatgtggattcgcattgttttgaatgtgcatttttaaatcgaaattctgcttctccatgaactcatcaactttgtcattcaagcgtttttcatgatcagacatgtgagattcagttctgaaaatttgatctttgagattattaatttgctcattgttttgtttgagctgacctacaaatttactactactcattaactcaccgcaattcctttaatcgttacatctccatttacggaaacaacctcaaccatgaatttgaaaagccctgcaatatcaaaatcccagatttcatttgtattcaatgtgcccgtacctaattgaaaatcagttttgtttgttccagcaatttctgtcttttcaccattttcatctacggcaaagaattttatttctcttgaagttgaggaaccagagatcttaacagtaatatcccgataatgtgatactacaaattcttcaccttcagacggggcagttgttgcttcgtggaatgtaaaggttgctttatctggaatggtttttaaaatattttcatcggtttctgtcaacaactccacctcctaaatctgtttaaaaactgacttttatttaaaaaggagaggggaagaatcccctcaaattatttagcctcaaatactcttacgtctctgtcagtaccgtcattaatcacatagacataaagtgttttaccagcagcgacaggaactgaaaaaggtttgtcacctgctgtcaatgggatacctgtatcagcagtcacagtagagtttccaatataaatcgtgccttctgcaggaggataaatagtaagtgctgttctgtcagtgatacctgcggtaactttttgagctgttgaagtaacagtgaatttatccgttttaaatgaggagaaaccgggatctctttcattcaaggtcacggaaggggattgtacttggatctctttgatagcatccaagccagcttgaggaaagtcaacttgtactggtttttcttgtgattttagatgaatgtcggtaattggtttaccagttccatcgtctcgagctgaagtgtaaatgtctccgtctttgtttaaaagtgccaagatatcaaactcctaacgttattttgtttcttgcgttgttccaatgtctacactgcttttcgatgccgcatcttcttgttccgttttaactccttttgtcccatctgggttacgcttaacacgtgcaaaagtaccgatcttgccattgtcatcagctaatgctcggtaaccaatttctggtgtgtaggcttgcccagcttctaaagacatgtctgcttcaccagagaaattaactttaggcaactggatatagagatcactgtaaattttcgatgtctttggatcgtactctagtgtgtgaatttcgaagtaatagttctcggagaatttttcaccactaatttcaactgtttctgcatcaacttcaatttgataatgagctgttacagcgttccctttagtagcaaacgtttcaggaacagtaattgttttgtctgaaacactaaattcttgttgatctccgtcttcatttgtaagtgagactttggataaaggagtatacgcgattttgaccgttccagaatcatctacaacaagactttcatcttcccatacagaaatcgtctcattttcaatttttacaccttgctgcattgccataaaatcaagatcaaagaaagcattttttacattacctgaaacttctttgcttgagttgatgacataaaggtctctatttccccatccaccttttaaaaagtcttgttggacttgttgcgagaactgagtcatttgcgttacagaagatgcaacgactttatggtcactaagccttttggttagcaccttaccaacttcatggataactgtttgttttgccaagtgttttcctcctaatttaaaatgaaaaagagactgaaagtcagtctccgaataattgctctaagtttttagcatctgctgtactgaggtggtgcttttcttctttatacatatcaacatgactattccagtcaccgattttcacatcagctgaaacagtggcaaataacgcagaagtgttataattcattatttcgcccattctgtaatatgacaggtacaattgataaattgtcatatcggctacctcttgatatgtatatccattaaaagcagccacacagctggcgatgtcctttaaatcattttgagaatcttgaagctttaattgattatttaaatcatgaaactcctgcaattcatcattctcaacaattttctcttcagtcaagcaatgcatctctaatatcaattttctaacattattaaatgctttctgatcaataagatgtagtgattctttgtccacaaatactttgctaaacactttaaaataagcttggttaaattcaggtaagtaatcatgaacaattttgaagaggctgttcttcttcaattcgataattaaatcatttaatgaaccatcattgttgatttttgaaaagtttctgatgatttccttcttgctcattttcatcatatttagctcgcttatgtactctgggtaatctcttaagtggataaagcttattgcaccgacttcagtattaataggccttcctaaaaagaaaaaatcctttaacacattcatttacttgctccgaaagtaaatatcaatttgtatcccaaatacccttcaggtgcgttcgatatgagcagtcttgtgtatttaacatttttaccgataccagcaaaattttgattgaagagcatgtcacaaacacgatccgtaattttcaggttcctgaattcagtctcttcataggtgttaatgtgtgtataaacatcaatcatcaaatcttgatctagcagcatcacactttgggttgagggtttagggattccattaccaagatagacacaaagcctgcaaattggttgatcggttaaatcatcagttttgggagcacgtttgattatggagtttaatatcgatggggaatcatcaactggatcataataattttccaatgtctgaacgtcagggagagaagaggagagagggtcatctttataatataaaagacgattcaattctgtatcattcataatagttctgaatacagttgtcatatgttcgaccatcatactcattcattatcacctccaactttctttttggctataagtctaattgttccggtgtctccatagaccttggaatagtctatatcatcaacacggaattcctcaccataaaaagaaagaaaaagacccttttttaatttttcatgttttaaaaaggggatggtgacatgtgcttgcccttcaggaatgtttatagccaattctgatcctattgttgaggttgtccgttctaaaacacatgggatgtcaaccttctcaccggggactttaatctttatcggtctccctgtaacttcatcgatctttccggaatcaattagtttgtcagaagatgttagactaattgatgaattacaaagccgcatagtagcactgtcattcattttgttatcggtagggcgtgaattaactaaccagtaactaccgtcatacaaaatcaagtcaccacgatttaataaacctaaaactgtaaggactttttttgtttcactgtcctgagtggtttgaattattacctgtgcaggcttgccattcaatttaatatcgtaagtttcaggtgaatttgctaagatttctttgaaaatttcatacttgtttgaattaaactcttcattttcccagccactcaaataatttgaagaagaggtaagataccaatctacagacaccgaaccacctcaatcaaaattatttacttttagtttgctcatttttttttcaatctcatcgacaagatcttcataggatctattaacctgagctttagtattagataaacctgtcaattgaatatctcttcctacaatgttgtttaattttaaggctctgtctcgatatcttcctaaataatctttgtacatgagtcttcctaaaatttgaatttgagcaggggagaggggttctttaaaatcttttgtttctttatcaaaacccagttcagttaaatctgtttcatattcaccaatagcgttcttgaaaaactgatactcaagtccatctggtaatatttcatttgactgaaactttgaatggaaaacgtttatgatttcatcataggtagtcaagatttaacccccttatgattgagtatcaaatttaaatccagtgtattcttcaatgaacttaatcttagcgtagtcattaatcttttcttttttagccacatcaaacagctgagctttttcagactcaagtaaaatttctttttgaacattttcttcgaaggctttttgtgttttataccccaagatttgtttaatccgttctacagtaacaacttcttgcttatcgtctttatcatcagtctcaaaacctaagtgtacacgggtttctttgtcatcaatatagattttggcatgagtaccttgaccgtcagttccagtgaatagcgaggtattgtcatagacttgggattgcacttctccagctgtaatctgtctaatcccattggctggcaatctgaagtctccgtgagtgtcaatctttcggaaatataaatcccatggacataggtttttaattgtgatctttttatctaaattaaaagacatgtaatccctccaaaaataaaaggagggacacagccctcctagattttaaattgtttaaatttgtggtaattcatattttgtgtctctgatgagaccaatttgatgttcttgtccttttgctacaccagccccaatttccatatcaaaacgagtaatctctgttccagtaataatgtcgttaccattcattgaagtaagtccgcctttttggaatacttgaagaggggattttttaccttgaggaacgaagaaaagaagtccttcaggaagatatgttttgaagttgtcgccggctttatttaattcagtaagattataagcgttaggtaattctacaacagaagaacctttataagtgttaagcaatcctgttcttcggatctcatccatcacagattgagggagcttagtgcttgaagcatctccggctacagcctgaaaccctgcaaagtcatttaactgagaaacaacagaaaagtcaccaacaatagaaggttgtccaaatcggcgaatctttgtgataatatcgtctacagatgatttggtgataccttcagtttcagcaaagtatttaacgcctgttgcatttttaattgcattgaacatttcatttacaacatagtacattgctttgttcatcatatctgtttgaacttgctccatgccttctgctactttatcgaggtttccactttgaatctcacgatagttaacagcatagccagaagaaatggtttgagttccaattggatattcgctccaagttgtagtagcgaacggtacgtcaccgcgggaagcttggaattggcttcggatggattcatgcgcgtatgttgtcatcattggttgctgatcatagccaatagttctaaatgtgcccataaaatcaaatagcttaattgctgaaataagcttaggctcaatggcataacgcacaattgtgttgatctcggctttagctacagggttgcccataagagctttggaagctagttccttcacatgggtcatagcagcattggcttttgctccaaacttggaaagatcttgacccgttgcagctgcagaaaagatttctacaataggggacttagcattcaatttagcatttgcataatggtttgagtctttttgaacattgtttaattcaactgtaaacattaataattacctccagaatattaattaagcctgtactgttaggtacaagccttttccgccaaatgtatttttctctaagacttttagagatactttaaactccgcaacgtcatcgccagctttaacccatttacctgttttgtccgcagcaggaaccaatacgtcatctttaacaagcgcatcataatcaactaccacgtctgagctgagttcaattggcagtccttttaagtctgctaaattaaatgcaaggacatattcaccttttaggactttgaagtcttctttattgcgaatttcaggtttatcaataatgtttccaaccacatatacatcaccttttgcagtagaagatgcgcctggagggaatgcgttaccagaagaatcgttagggattacggctagaccagggactaaatcgacactagccttgcagcgtggattatttcgtacttgtttgtaagcaccaattgttccaaatttgaacattgagtattcctcctaaattttataaaagtgttattttatcttaataaagatcatcaattgtcactgaaccttgttgcccagaatcacgaacgtctgaataaatatcgaaatttttgctattagtctcagaggcttgtttctttgagcgttcagcgatgaaggatcgggcgattgctgagttgatttcagaaataatttcgtttttaagctcgatagaaggggacttagagaacatttcaattttctcttttgcgacatccttttcttcaggagaatattcctttaaagcttggttaagctctccttgcatcttttcggctaccgccttgtttttgaattcctttagggaattaagctcttcatctgccttggctttttcatccttggctttttgcgcttctttttcttttgcttcagccttagctttttcatcctttgcagctttaacagcagcattcagttcttcagttttttgctttaagtcctcagtaagtttctcaactttttgatttaactctccaatttctttattcttattatcaagtttgttgtttaactcaaggactacttcttcttgagattttgacattaaattatcctcctttttgttactgtttaattcaagtaaaatggcagcgtcatctgcagggtcaatacctaaaattgcatcacctgtaaagtcaaatttcataggtatacgtccttgttctttccagccaccttcatattcaattgcatctgaaccttccacagctgctatctcaaccgaggtttcagggaaatcaccatcaaacatttttgattttaaccattgaacaaatttagggtagcgctggttgtataggaagccttcagctattaacactctttttggctcaccattaacatctatagtatcaatgtaagcattggtggtcgtaccaaccacagcgctgttttcaaagagcggggtaccgtccttgacttctgttaacccgtgtccgaatggctcactgttttcatcatccaagaactctgcgcaaattggcattaacttgattgattcaaggttagcgttgatgtatttctccagccaggtaatgccattcttgttaaactgagtattgttttcatgaatttcaagaacgacccacttgatgtatgtctgaccactggttttcttctgattgttaatttctaaaatcgtgcttttcaaatactaatcacctcctctcaagagccagaaggcgttccgttactgttatttgtcttcgatttaatcgtgttttcatttttcggatcgtcgatctcaggtgcgccggctgacttgtcgctattcttactcattgtgaaagaggtcgcatgaacagggaacttttcatcaaaaccttcgtctttttcatattccattagggataagtaagcatcaggattccatccagtcgcggatatccaagcaataaggctacctcgaccacttgtataaagatctttcatgttttggactttttctttcctgttaacgtgagtaagagggaggtaataaacctcaatataagagcgaggatctttgatgatattggcgtttatcaccttgttaaactcactttgaatttgttctaaccaggagaatatttgggaagaaaccatctcgatattggtttgttgagaagagtagttaccatcttgcccgttgagagcagaaccggcaaatcctaaatttgtagtaattcgcttaatgagctcgtcttcacctttaaccttcaagaaatccacattggtttctaacttgtctaattttgttcccgaagccaaggagaagaacttaacacctttaacgcttcctttagcaactaatgctttttttatattctcatgctgctgttcctgttgcttctgagataatgcagatttacctttttgatcaccttcagggaaagtctgataaattaaagtgctgttgagctcatctaaaatgttccgtttagtgtcaacaaagtattcatcataaaccatatcaataaatgcagataaaccgattgggcgtccccattgatcttcaatgtcgctgcttcctttaacagcaatggtcttattgttatcaagaactagccattttcgattttgatctttcttataagccctatagccttgtctaatttcttctggccatcgtctaagcttgagcgatcttccgttacttgtgaacttgtcaaaataggagacatcaaaagctaactgataagaggagtttttcctgcctataattttgcaataatcgagaggaagggggagaacggaacaattaaagtcgtcaatagcatttgattcagttattgatccgatctcattgtcacttagagtagtggggaaggaatcattcaccacagaatcaaaataataaaaaccagtgccatatttgctgagttttcctaatgcatccctgacagcacttttgtcgccgatttttcttaaagccaggttgaatctttgtttgttcgatttgaaactatccactttacttgatcccaaaataactctgtctaaagtaggaagggcaaccatgtagtcaataacgtttctatacacgccatttgcgttataaagcaatttagaggcatctctaatctgtttattatagacgttgtggtctttgagccatgatttaactttgtcgtaagaaatgccgttaaataaatcattgaaaaacaatgaatcaagcggtgctaaatttgtattaaattcatatgatgactgtggttcaggtgtagtcattattcacctcctcaatctctaattaaaaaagaatccaaatgaatactcatcatcggattcttccttttctaaaaataaagctatgtaatacagagcataagcaattgcactgtacctatccttatcaattctttttacaacttgctcaacagtgaaagaattctgtgtctttttaattcggaggtttgcaacttcatcaatgaacaattgagtttgaatacatgctgcttcaatcattacatcatcagatatgcttttttggttcttgatgtcatcataggacttaagcaacttcaattttccggactctacataatccaagaattgagtaataatgtcttggttaatgccttgggattttaggttataaacgatttccggcgaatttgggacatctggcttttgatcagtgtttattgtagcccagcacccaagttcttcattggtctccggatccgtaacatcctctaataaccggtcgattaaaccgccaccgactccgtttccatcgacaataacagctttaactcttgagagggaagtatcttgatttcctccatagtttttgaaaactctttttaccatgattgattgttctttaaaactcaatccgtttggcggctctatgatattgactacttgaacttgcctaatgaggttgttgctgtttctgataatcttcaaaacgacgatagctgttttattgtttgattcagctgcagagcgggctacgtcaaccccaattacatattcatgtagcaagaagttcttatttttatctctcggacaggaaagttcagggtgggtaattgtccgagctttgatcaatttactgatattaattaaagcaccgtcactggcaccaatccaatcacaaagatagttctgacggaatcgagttacattcccttgtcgtgctttattaataacagacattttttgacgaccaaagtgaataggaatgcgccaatctgatccgaatacaaaggatcctttaagatcaccggtttccttaaccattgtaaggattttttcatactcatctgagtttttatatcctgatgtagagaatcggttaatctgaccatttaattcagcgggatcaatttcgccagtcatggttgtgcgagggatattaaagatcggctcgatagcatcatcgtataaatctttatcaatcaaggcagattcttctaaggagccacgtcttctacgtaaacccttagaggattgagcgtttgccaggttatcgataattgccccgttttgaaattcgactcgaccactgtcttttgaaaagttttcactcttgatttcatctttaatggaagggtaaaaccttaaaatttcctcgtgtttttctttccatatttttaccgccgattcctttgtggaagcggtaatggctaatgttacattagggaagcaaatagctgtatggtaagcaaccatgatctgggtaagcgtttttgatccgccacgtggaatgcagaagtagttctgagggaagcgactgagggttctcatcataactctttggtataaatccaactcaattccgccgacttcaggtttcaacatatcgtaaaaaatgtctggataaaaacgaataaatgaggtgaactcagcccacttggagatattctttccaatgaggtttgaattgtcatctggattcagaggagtttcaaaagctgcgtcgtaaatatctgttctgttttttgtgtgcttcttgttttttgaggtaaagtttttataactagccattactcttcatcacctgtgtcataaagaggttctttgtacacattctctaaatctctgaacacattgttacgagcactcttcagtttatcaatttcttcaggcgacaatccttttgatttgaagtcctcttcgagcatttcatcataaaagtggtaaatgtccttgtaatcgactttttccttatcttcaagccttctgtaataatttataatcgcccaaatgattagatcagcgtcatcatatggttgagctgctaaacgagggagaagggggataatgcccaattctgtttcaacggcttcaaataattgagaaagtacatcgacaccaccactgatatcgctcttacttaactgagatacattaatttttgcatctgtagctgcttttgaagctaatgaaccccattctttagcttcttttacatcacctttagcagttgctaattcctcttttacacgaaaacgaatatatgaaagcaagccttcggtatgaagtgtggttttttctccgtaatttcgaataagtttattgtattttctttcaaactgacggtactcatcaggggtgtaaccaattccccatttatcaatcaggtcatctgagatttcaggtgggctagcaccagaattgtttgtaggcgtagattcctctataagtggattctctggttgtctttcaaaaacactgtctttataaccagtaccgttaaattgcttcaatgaattagccattgtcatataagcgctaaatgtatctgtttttctcttttcagcttgttcccaatacaacggatcaaatttaacatcaatctgttgtaagactgtatatattgattcaatattgttgtaatcaatgtttttcttcaagcaagtcttgcaaatagggacttttcctgttttctcatacaggctgcttcgtgaattgtagaaccccgactctttgtccttttctttttgacaagcagcacaaatcaatttttccttttctttggcttttcttggcattggttcacctccgtattattgttcaaaaacacgttttataaaacgcccagcaatagagaggggacaaggcttcctcaatcatcactaggcgttctaaaaaagtattttatttataagttaaggtaccatttttggacaaaacaaccttggttccttttaatatatcagcaagagcatcaagcaaaccttttccaataccgtttgcatcaattattaatttactcggtcgtttgtctataatcatggcttttatttgactagcctgatgtttaaacgttccatgctccactttcttagagatgtcctcaatacgggaattatttaaatcaataattaaaaaggttgtttcttctcttccaggattaattacagcaattctttcaggattatggcccgcactcaatgtgtaactcgttccgtttaagggtttagtagagaatttgacgtcttggttcaattgttcacttttagtggctttctcaaatcccaggcttttatgcaaacttgctagggcgtcttttaattccctgttacacagataaccactatcattaatttcttttagtagctttacatattcccaaagaactttagtttcttctttcaatcatcctcatcctcatctctataaaattaaagttttattaaaaaaaggttaatgattaatatacagatttaaaaatccgtaattagatgttgacacctgatttaaggttaacttatactaattgtgtattacaatatagaaggggagatcgttttatggaaaacaaagttacattatcagatgttgtacgtgaaaatattccagtggttttaaaggattcaaaacaccctcttacagaaaaagagcttcttgaagaactagcaaaaaagatacctgaactagttaagaatggtgagtatagaaatggtgttcttcgaggtgtattgaataaattatctacacagccagtcgatcgattaggaatttcacgtgaaggtaatcgagttaagtattatttcattacagataaaaaaactgagcttcaaaatgttattagaaatctcatcagcgagattaaagaaaaggaattattgacagttgattacttaaatgattcgcctgagacaattgactttttaaaagatgtatctactcacattaaagacttagaggaatttacaagataaaactattaaagaaggctactattaggccttctttaatttaatatgtaatcatactgaatagtccggccttttccagactcataaattgataagtttgctccagcttttgcacctgtcattaggctgtcactgtattcatcggaacccataacagaagggagttgtattacttggacattgtgagtggctgcctcacctacagtgagcatatttccgtggtggaagtgggagatgtacatataatcgtagaattttcgtttcatctgtgaaatgtcacgaatagcattctttttgtttttaatctggtgtccatgacaagcaatgatttcaaattcaagtaatttaaaatccacaattccttcatcttgaagaagtgtctcaattcgctcattgcctttgagcatgtcgtgaatatacgttgcaatgatacgctcaacatcttctttaggcatttctgagcggcttgtgttatgcaatcgtaactctgtatgattcgcagaggggatatgtatgtatttgattttaacgtgcttagaaagctctctgagccattcaactttatacctagagtatttaatcacttggtcaataaaaccatactgaagggctgttaattgtgatacacgcaatgccataccttcaacactgtctgcgccattcaatacaactagctcgtccaagttttctttttttatgtgctcaacagtttcagaaagaatctgattcatccgctgcaaataaatctgttcgttgtattcattattacagcttttaaattgcttcccaaaatgttcatcaccaaatccaagaacagcagccctttttctttcgtttcttttcaatggatagaaggaaggaggagggggagtacctactttctcgatggcctcagttacattttcataaataagctctgttctgctcttaacactagttttcttatgtatttcatgctttacagcttggagcttttttctctcttccataatttcaacctttttcatttccatttcaataagggaggagttggactctgcagatttctctttctggtattcaacaccttcgatgaagttgttaaaccactttctatatgcagattctcccttagattcaccggtctctttattgatcaaatctttgatttcttcccaattaagattatagatgtctttattagagcaaattctaattttccattctttaagattttcatctgagtggcgctttgtttgaataggatcgatcattcagtcaccacctactcagaaagtccttcagtttcttggggaacaacatcactgtcactttttaacgtgaaatcaattagctccgttttgctttccatctctcttaaatacttagataatgagtgaatttgtatgccatcacctttatgctcaataatttgatcttcatcaacatttacagtacattttttaaaagaatactctttcttgcctttagccaaattaaattcctccaatatgtgttttatttacgttcaataagctccttcggaagcccgatgatccgaagcatcggtaacgtccgaaaaggggatataaaggagatgaaagataagtcggataggcgttggggaaacgcccgaaggagactattgataacttagtacgactagatgtaaacacgttccagtagatcacttgtaaaaaaatactagatatatagtggtttatgtagtaatatgtctatgtaacaaaaatacacaaggaacagtacatgcttcaacctttttggggaggggaaggtacgaggtctgtctgtccaggcgctcaacagttgtgatcttggacaggcggacttctactggactcgcgatccggtataccgccggtaaaggaggtgccactgcatgttgttttctgtccttgttgatgcaagaccagcgtgtccggaatgcggaacgtacagtaaagacggtaattctgttaatgctgatacgtgttcattctgcaaagaaatgaacgcataaaaagatgcgctgtgctggtggcgatagcgaagaggtcacacccgttcccatgccgaacacggaagttaagctcttcagcgccgatggtagtcgggggtttccccctgtgagagtaggacgccgccagcccaaatcctcttcgtggttgacaattagacaacaaaattgtatagtaaaattaacaaggatagaaaacagcatgctgtaacaaaaaaggtttttctggagtcgcgaccagaagagccttttttgctttttcaataaacttatgaattgaaataaatattggagtagctggctttagaaggaatcccaaagctggacgtatcgaggtattttttgtatctcccacgcgggattaaacggctactctcgtttaatgaattcaaaaacaaattacgagaaggaaagacccattataagccttctcaatagcattttcagtctctcttgtcaggttacacgccttattgagaaacaaagcgtctcaaacgctcgccatttattttgcacagttttctctgacccgtgtaaggtggtatgtgcatgggaataagcctccattcagaacattgaaggagatgaagtgaaatgggagcggtgatcaagcgcccaacaaccatttcacttattttacgagtatagaagactcgcaaacccggaaaatgtttatgtgaccgcataataagcatcaaagcttacaagggcattatttaaagggaagggagacgcatctgccttacctaagtgcaagctgaagcaatacaccgcaattaatattcaggctatatgccactcataataagaccctgatgggattcagtcgcaatttgcaataatgcgttaagtcttatcggcatatttagcccgataatagccatttacctgtctcttttagatacagacatccgagttaacctcgaaccctcataaatgaccattatccgactaaccacaatgaccagttgtagctgtaaagtcgaatttaatgcttttattcgtatgaaagtgagaatagacatatttagaaaaagcttaacccacggtggggcaataccccgctaatatccacttatccgaaaccctggcattccaagtcctcaaacaaatgaatattagccgagaactgatatcccacatatcagtaaacagctttttattgacgacacccccatgtcatcaataaaagaactctaattaattaacctggagataaatgcggaagaggatttgcacctctcatgaacggatttcaacaaccgttagccaaatcgactattatgtagctccgtagtctacttcacagtaccgtccttatgttcgtctaagcgtctacctattccgccaccacattcataggttaaagagggagagataccaatccttcattttatatattaagctttcactgcgtcttttagagctttagcagccttaaatgcaggtgcctttgtagccggaatatcaatttcctcacccgattgtggatttctccctttacgagctgcacgttcacgaacttcaaacgttccaactcctggaatcttgattgattcaccttttgtaagtgtttcaacgatcacattaaatactgcttctactttaggcgcagcttctttcttagtaactcctaatttttctgcaacttctccaacaaattctgttttgttcatgttttaattcctcctagtgatattgtttatttttgtgttaaagtataattacggtaacgtttatgcttctttgaaaaacgggagacgtactcacccttatatgtggaaattagctttctttctcccttatggcgattatctcaaaaggggctttcagaccagtcatatcaagggttcaaggcgcttttttcgttaaactttttccggtaaaatcgctgtaccccttgggggagtaaggctcagggcactttctattctaggacattctttgttttcttttgctattcctccaagaggttctgagtttttccttagagcatttgtcacataacttctttttatttgatttggttttatatagtttattgcatgataaacaaattttggttgattttaaattgacttctaggtttttaagaatgttttcaccgaaacactcccacaaagttgccttaaacttactctttttcttgtataggtgcttaactaaaacatcagtaacatattgctcgtcttgatgaatcttcaataacctgtctttaatgaccttatagacataaagtttttgtccaggcttgatgtcttcatcattcatgagccatttcttgttttggtctaatcgtttgtattcacgaataattgcatcgtccaacttaatctccttgttcttgagcaggaaacgataatcaaattttcctgctactgctgcgaaattaattcggtcagaagggataatggagtctaacttatttactgtgctttcattaattaactcaacgctatgttcttctttatcctttgcattgatgaagaagtggggtactttattttttatgtaatctttaattttttcatcaacatgatcaggacgggtgggcatgaataaggtttttgcgaactttgataccctcggtttcccgatattttattagggaatagaccatatcatcatctgtgctagacagatggtcagcgcttcataataaggaatttcaccttattattactccataaaggatggtcgttgcaccttcatttacaagtgcttcccagcatgatgtaaacgcttggcacagggttttcatataatacattctacattcattttacatttttataggttcttccttgtttaattccatagacaacattgggttttatgttacacatttttgcaacatggggtgctgataacccttttttaagaagttctcttatgcgaaatacttcttttggagtaagagtgcttttcttcttgcttttgtatttaagaataaagtcgtcccacccagtaacatgaatatgattccatactttacactctaatattgatttaacgatggggtaggaaacacacattgactttgatacttcggacatcttttctccattaatcaaacgaacttttatctcgtatgctttcgtttcatttatttttgaggatttattttttgaccctaaatgagactgacgcatctttaatctagattctggcgaatgccttttattcattctagattgtaaaagcttttccttatgctgcggagagagctttctgccaattctcgctttactcattttggctttagtctcatcactaagctttcttccggtgttattaatcctattcttttccccaataattcttttggtggagtcagacatcttacaattactcttgccctctccgccggtggtcatgttaaagccatttaaataggcacctagttcatttatgtagtgagtttctaattcgttcatatctgagtttggatcaactgtttgcaatacatgaaattggaaatcgttttctccatatttattccaggtattctgcaaatgtcgattacagtgcgaattgtttttcagcttccaagtgtgatgccagtaacgcttaataaatttcatcttagttttccccacatatattaagccggtgcttatctgctcaatcttatatatcccactcaaatatttatgctcatcctcatttataaacttcactttgtcacccccttgttttaaatatcattgttcaaaaatgtaaaatgtattaattagaattcccctgttagcacactcattgacgatcatttcctatcgctacttttcgctgaatgtacaccctagatttctaggttcactgacttttcatccgcatatcgctatgcgacgcgactataaatttaatcgatagtaaagttattttccatgcataaccatttgatcacatccagatttatattgtcgctgttccatatcttagtgatgttgttgctgtattccccgatattgatcccataagcaagagttagtgcttcatatatgttcctgctattaatctcttgtttttgtgctactgacatttcataatacaaaggaacgatgttctccatattacgcttggcaatattgacgattaactcatcagaaataattaaggccttatccccgtcattgtcaaactgcagcaacttagatatcggatcatgaatgcttgtgtaaacacctggggtaataaaccacttttcatattcctcatcttttttgttccacctaacaccatgctctctgaataggtgaggggagcggaggatgtcaatatacccttcatcatataaagaacaatggacatcatttcctgaaagtagtccttttggattctggatattcagaaataacttttcgcagaaagcatacagatcaggacataaatatgtataacgagcaccatccacaagcaattttcctgatttggcatctttaatcatgcttttctttttatttttaataatttctttcgtgtgatcatcgttaagaagttctggatatagaagtaaagcgtcctgaagagctgtccgatgtttctttttctccgtagctccaagaactcttaacatggtctctttatcagttcccaatgtggttatctcttttacagtctttgagctcatctgaattaattcttcatctgagatatctgtaagtgtctgaagcatttgataagtgagtttaccttcaacagaagggtcttcttcgttgagtttagcctctaagcatccatattttttgtaattgccttgatattcttcccacgatgaataatacttccacattttaaactgacttttagtgaagataatttgaacatcatctttcactacgtcccattccttgccgtatatatcagttactttaaaagctttgttttcctcagcaaatttacgaaaatcaaaagggactaataaaccctttacccacgggagccttaccatgaagcttttacgacttagagtggggagtatcattccgcagccatctgtatgctcaatgggaatgttcattgtttttcgtgtgatttcgtaggtgtctcggtcaatatagtcaacaaggcttgatacatccgtttctaggtcgttgacaacaattgctttatcaatatcgatctcccaagggctactggcgctgtttgatagggccatatagctattccatttgttaatgctgctccctccaagggaattaatcttttcaatgctcaagccacaggtcaaagcatcctgatacttgtcgtaggtgctttttttaatgaaacatgatttctttgtgcgaatttgaccggcgctactcgtgaaataaacgtatttttcattgttatgtaaaaatccttgatcaataatgtctttcaatacctcaaaatgataagtctggacaaccatgatttcctcagaaagggtgttttctttaatcccgagggttcgagttaacactgaatcaaataatgaaatcactttgttgtctcttaaactgtcagttcgaagtgttcttatgtcattatgttcatcgaatgcggaatagaggcattctttaaggtatgtaattctttgcgaaatgtatttcttatgtctattatgtacactatctaatgtcttaagataatctctgtatctataagacttcaaaatcctattatgtaatgaattttctttgtcattataaaatgctgatgtgtccacactgtatatgtgaacttgcttagacaatccatccttttttcttttcaaccaatcccctccgtatattttatttttactctaaaagtgcttaatattcgctattaagatattgatttactaaacttcgatatgtaaagctttgttttttaatctttccgtaccatttgtaatcctgataaaggtgttcttcttcgggtgttgctgtcccatcgactacttttccctcaataaaccccattaaatgactaaataaatactgctttttcatcttacacctccatactattttatttttattcttaaaatgattaaaataaagaccacttcatgtggttgtgtttttattatatattttatttttactcttgtaaacataaaaatccaaagttaattggatttaatttcgattaattcaaaaagatcgtcaactttacaatttagaatatgtgccatcaataaaagattgtatgtactagggaggacggttgcaaatccctcgctgtcatttttacaccatctagatatacttgctctttcagcttttatttgctctgctaaccagcctttttcgatacctttgctgcttagaaatgaatccaacttacttttaaccctatattccatttaaatcatccttttgctgtttgaataaattttataaaatgactggtttacatacaagcagagtgtagttatttgcattaagatacaaaaatatttgcatttaaatacaaataaacaatataataatcgtagatcaaccaagatacttcaaaatcacaagatattaaggaggggtcacatggatacttattttgattcagtaattgacaacttaactcgaaatgatttgtatattctaggcttattgagcgatgaaggggctgatttaaagtttaaatcaattaggaagaaaaccattcaagcaaaaactcagttaactgatgctacctttagaaagagcatagatcgtttagaggccttgcagtttattaatatagttaaaaacagtaaagagcatacagtttttattactcaatatggacaagaagctttgagatatcaattagaaggggagagggtttaatgtttggctttattggaattgggcaggccggtggaagtgtagcagatgaagcgatgaagagaggatttcattctgtcgcaataaattattcactttcagaccttaattcattgatcaatattcaagataagcttcatctggtagggacagaaggagtaggtaaagacagaaacgtagcagcgaaacatatgaaaaataactgggagtcctctattgagtttataaagaacacaatggaaaaaccttcagtacaagttatttttgttgttttctctgcagctggtggaaccggttcaggggtagctcctatattattagaattgttaaacgaataccttgctcataaaaccatagtcgctgttccaatccttcctgacaacaatgaggtactggttaaccagatgaattcactggagctacttgaagacttatctatgccagagacatgtgttttacctttggataatcaaatggttttgagtaaacatgaaggaaacatctctgagagtaggctttacaaggagacaaacaagctgttcctggatttaattgaagtcttacttaattacacggacagaggatccaagatcagcacactagacaggaaggatttaaatcagctttttgatacgccaggaatcatgactattgcccaaacaaacctcaatgaatttacaaatgagggcaagtattttgataagctgcatgaagatatacagaagtcgtggaacaattcgatatttactcctgttgagtttacaaatgtgatgagagctggagttatcctagatgttcatgagttcttaacggagcatatatcgtataatgagctgtttaatgtctttgataacaagatgcctttagacttatttaaggggcattatgataaaggtaatagggcgataacgattcttagcgggttaacctggatcaatgaacggatgaagcagttagatgatttaattgaaaatggaaacactgaagttaaagaaacaactgtttataaagcgaagaatcgccgtagaaaggatttattcaagccgaggaagctagagaacaaggaatcgaaaaagacctcgtatatggaggcactgaagagactaaagcgctaattttaaagggaagctgcctactaaggtggctttttattttgattttttatgaccccccttagtgatcgtgagctaaaaaagtgcgtatcgtgaatgaagatcggaaagggttaattagttgatatagcaatgttttagagctgtcaaaggggataataggtgttttgtgatcgtaaaacgtagacaggagagaggaaaagtggacgttgagttaaaaatttgatgaaaaagggaagaatgaggggtagaaaaacattgatactataggcttttacgatagcgattacgatgtgaaaataggctgaaaaatgggaaagtgaaaaaataagttgggtgtggaaatggaagtgctaggggtacatttgttcctgttttttagcctttagatgttaatataccccctatatattggtattgaattccctatataagatacgttatgtagggtttttatgatttggctgataaatttagacttctaacacaatttcaaatgaaaaacaatatttatttttgaaaaaataataaagcggtcaatttaaaagtgaatacccattcattaaaaataatcgtgtgtataacgaaggggaatgaatcgaagtgttatctatcctatataattttcatctaatccacacacacctattttatattcactttaatcatattccttcatctcgttacatccaccattacatatcctcatcttgcctaatcatctccatccaattccttcaccacacatcatcatatatccatcccataacacactaacaacaccatcagaagcattctaatacacctataatcaattttaatttaatcatagtatcattggtatccaatccacatacacgccttatacagcctataaacacccataaataatagtccaaaataattgaaaaaaatccatatttagagtaaaaataaaatgaatttgtaggggaaatgtgatataatagagttataggaaaggaggtgaaaagagtgcttgagaaagtgggtataacaattgctttccttattcctatcacggttttaatcatcaactgtttaacgatagctgagaagattcaaaacctgatgaagaataagaaaagcaaaaagaaaaagcgtacacgcaagcgtctccgaccagagagacaacgcaaacgtatacgccgataaacctctaaaggggattaagttcccctttagttactacccatattataacatggacaagcacattgtaaatatgaaacgattctcattatggtttacgaacataacatttattgttttattcttattgttcctcttcatcaaagattacttcagcagcggaacacagtcgcttattacaggtatcttcatagtaacgtgtatcatcatcattttattatggatcgcttactttgtatacgccaaaagaaggtaaacaaatctagctaacatcatgctatactaagcgtattagaggtgagcggaatggaaaagatacttgaagcaatacagcaactttccagggatattaacacaattaagcaggacgttaaggatattaaagaaacggttaaacgaatcgaagaaaatgagcctgaagaggttgtatccatgcttaagattattaacaagaatattgaaagtgaccaccgatacaatgataagaaattttctggacttgaaagacgtattcatgatcttgaagaaagaatcaacaattgaatttcatatatgagaaggagcggtaaaatatttatccgttcctttatttttaatattaaagggggaagtctatatttattatgaataaaattaaaataattgattctataatgggatcaggtaagacaagttacatgatacaaaaaatgaatgaagcacctacagacgataagtttatttttattacaccttatcttgatgaggtaaagaggatcaaggaagcgtgtccagataagaagtttattgaacctaagatacacagcgtaaacggagaaacattttataaactggattcgttacataagcacctttcagataataagaatatagcaactacacacgcactctttaagatggcaaatgagacaacaaaagaactcatctattcaggtaattatactttgatactagacgaggcaatagaggttgtaaagcagttaaacatatctgcagatgacctggatatgttatttaaaaataactggataataaataaagacgatcgaataatctggaacatggaacaagaaaagaatatgcaaagggaatatgatggagagtttaaacacttgaaacagcttgcattaaataacaacttaatattacataatgattcagtcatactttggaacttccctgctgacatattcaaattgtttaaagaggtatacaacttaacatatctgttcgatggacagttgcagaagtattattatgatttaaacaatattccttatgagaaatatatgattaaaaaagataagggaaaatataagtgtgtgccttatgattcagcagccgataagcacattaagaataaaattaaaatcaatataaatgtatatgatggtgatcttaataaaatcggtgaagaaaagtactctttatcaaaaggatggtacagaaataaaagggttttacataaacgactgcagaataatatcctgaattactttcagaacatatgtaagtctaaatcaaactttaatatgtggacaacgtttattgattataaaccaaggctttcaggcaagggatatactaagggattcataccatgtaatatccggtctacaaatgaacatagtcataaaaatacactagtttatgctattaatcgttattgtaatcccttattagttgaatactttagctctaagggtattaaagttgatgagacttattttgccctttcagagatgattcaatggatatggagaagcagcataagaaataatgattcgatttcaatttatattccatcaagaagaatgagattaatgttaattgattggttaaataatgatttataatccttattgcaaataaagcaataaatcacaaaaaaaagtcaactgtcccaagggtttgaagggtgtgtcccttaaaggggaagaggggtaataattaaataaaaaataataaattcgtccgtaaagaaagtgcctttacggccgtctcgtttcagcaagctgaacctcgataatatgtttttcttttttagaataaaaataaaataactattgaatatttaaagtgatcatgttaaaattaaatcaagtcaaaggattacatacatttagaataaaaataaaattattataaagaatggagaggttgaaaatgacagctgttttaagaattaacgaagagttaaacgggattgaactttattttgatagtaaaccagaacaagaggttttaactcatcttaaatcaaacggttttcgatactctggattcaaaaaatgttggtggagcaaacggacagaaaaatcaatgcaggtcgctaatggtgtcactaaacaagaaatctcatcttctaaaacaatcacaaaaaccaaaaagaaagctaagggtgtaaatatgagtctgtgggatgcaacacaatggagtgaattagaagtaaataaggaacaagaagtaaaagaaatggcaaaggaaataagaaagcatataagacaacgtttcccacaatgcaaattctctgttactactgggggaagctatttacatagcactattaacatcaaaatcaaagcaagcccttatgaaaaaggctcaacttatttgactgcgatttatgattattgcaacagtcttttaaacaattatcgccattgctacagcccagcagatccatacactgattacgcaggcagttacaatttctatggtcgtgtttcattagattgggaatacacagtgacagaacaaacagaagaaattaaagaagatatgacactgtttgattcaaagatggaagaattcgaaagagccgagaaagcgagaaaagaaaaagaacttcaggaatatttaaaagagcaagagctcaaaaatgctgaatacaagagacagcaacaagaagaaaagaagcaagtcgaaaatatctatagcagcattgtagtaaaacaactgaatgaagatcaggagtattttgttattgatgcacagtttgccaacttaaacaaaaatcaaacacttgatcaatacaaagacgaggttgctaaaggtgactacagacttgaaaatgtgaaaattacaaaagaagtacatttcaatactgaagaagctttaaacaacttttctaacttgcttttaaatgattttgattttcttgcggaaaccggtggaagttttacggaagacaacagaatcaactcaatgattgattattacaatatggacgatcttgaaaagaacacagtcaaatggaatttatatggcgtaggagtgtactatgatgggaaattgcaatttattatagacgctcaaggccattcttatgcgagatatgttggcttagtggataatgccaaaattgaaaagtcaatttctcataagcaagcgttaaaagaagaattgcaggagttaaaatatcaagcgagaaaaatagaagatctttctagctcagtcattgaagaattaaatatatttgcaacctggaacaatgaagactgggacaaatataaaacttcactcaaagaaaaattgaaattgaataatttaaatttaagtaaaaatgttatccaacaagcagatgcagaaaaattaaaaactgctttatacagaattctccatgaagttgacagtattcaagaacaatttaaaaatgctgatcttgaaaaaggtgaaaaatatactctgtttcacatatctgatcttggatctttaattactgaaagaataacatatgacagttaccggccaactaaatatgcccaatatgataatgcagtcaagttgacataccggcctgaaagtaaaagaaaattatattttcgtcacttctattcagaattattgatgttcaaagggtggcactcgctgcccgaaacagtattgaataatgtagaggttaaaccagatggaatgaaaataattcatagtaagtaccactcttgcgacaaaagacaattcgatgaggttttaggttatttaaataaaaaaagcttcaaaccaataatcaacacttataagcctaatctataaactaatgaggggatgggaaaacatctcattccctaaaaaggggagctcaaaatgtttaaagataatccggatttttatccgacaccaccacagttaatccgaaaaatgacatctaaagtagaatggaagtacattaactccgttctggagccctcagcaggcaaaggaaacttagtagaagccatttacactcaatttaaaaatactaggaactatagaaggaatacgaaatatgatgtggatacaattgaacaagatgaaaccttacggcacatccttaaggggaaaagttatagagtgatagcagacgattttctgacctttaacacatacaagaggtacgatttgatttttatgaatccaccttttagcaacggtgctaaacacttattaaaggcgattgagttaattgagaagcaacaaagatccggccagattgtttgcttattgaacgccgaaacattaaaaaatccgtattcaaatgacagaaaatttctcatacgtaaactagaagaaataaatgcagaagtcgaatacattcataacggtttccagggttcagagcgaagcacagaagttgaaacggcactaatatacatatgcattgaaaagcaagaatataacagcgttctaatagaagaattgaaaaaagatgagtttcatagaattaatgaggattataaagcaacacagttggtgaatgcagactttataaaagggattgtagaacaattcaattatgaaatcaaagcgggtttaaaattaatcaatgaatacaacagtttgaaaccattaatgctgcatagtttcaatgatgacagtactccaatattgaagctgcaaattgataagaataccgaagaaaatgacatagagaatgcatatataaaacaaattagggcgaagtattggaatacgttatttaacaatgatcaatttatggggctcttcacaagcaatctgaaacaaaagtatttgcagcacgttgaggaattaaaagattatgatttttctttgttcaatatctatacattaagaattcagatgagtaaagagatgacgcagggcgtagaagatacaatacttaacctttttgaagaatttagccacaagcattactatgatgaatcatcaaaaaatgtgcacttatataatgggtggaaaacaaataaatcatataaaattaataaaaaaataattattccattgaacgtgtatagctggctagatggtcggtataatccaacagactataaggtcttagaaaagttgaaagatatcgaaaaagttttcaattatcttgacaatggattgacagaagacataaatattgttgaaactttaaatttagctgagcattatggggagacgaaaaaaatagagttaaagttcttctatgtaactttttataaaaaagggacatgtcacatcgagttcaaagatatggaaattctaaagaaatttaatatctttggcagccaaaagaaaaactggcttcctccttcgtatggcaaggtaaaatatcaggatatgacggcagaagaaaaagacgtaattaatgattttgagggtgcgcaatcttacagtgaaacggtaaataacgcttcttattatatcctggatacatcgaagcttctcatgcttacatcataataaaatacgcacttttagaataaaaataaaattagtattgattatttaaaatggtcatgctatacttaaatcaagttaaaacaacagcggagcatgcatatttcaaggatgaaaataaaataaaatgcatattttaaacagaatggagagaattaatttggataaaagtcaattaataaaggttggctcaacagtatatcttaaaccaatcaataatgccgcacgatatggaagaaaagatattctagagaaagttgtgttaaaaaagggaaggaaatatttctatgttggaaatacgggagagacagaaacaagacgcatgttcaaattttctttggaagatatgagagaagtgacagaatatagtcctgactgggagctttatttatcaaaacaagagattattgataaggaagagaagaaaaagttaatgtttgatatacgatcggtctttgataggtggtcgacggctgatttaactctggatcaattaagaagggtgcatgaaattatttctgaataaaacaacaattttaaacatataggagggtgctgtgatgaaagaaggaacaatcgatttatgggatagaaaagacggaaaagttaaagtgatcataactgatttattgaaattgcatccgtacacaggaaaaggaaatagatcgactgtaagtctatttgattttgacggaaattatagatgccgtatagaccatatacagagtgataagaatctagttggagatatactcgaagcgttagaggtcgacgacagattcaaaaatttcaaactagcattcgataaggacattaaaatgtacgaattttcgataaatgaacatgggaacatgccgtataggtcatacaatacaaacagtgtgacggcagttatcaatacaactttcgatgcattaatcagtatgagatacatgccaaataacggagggtacgcagtgacaaaagataacgagaaatattgagattggaacaatttcaagaactggtcaggctaaggatatgaaagacttagattgttcggtcttacatagtatcgacaacatctttaaatatcataaaatcagataggacgggcgtgtgtagtttggatagagagaaaatcaatgtctataaatcagaagaaaacgattattgcgatggatgtggacacagaagaataaagggcgtatacagcgtatacgtgccgtatgcaagaagtattgtaaatgtatgtgatgattgtaaagaaaagcttgtgaatgcattgaaatcggaataaaacaatatttcacaggggcttgttagccaatactaaagcgaagaggtgagagagctcaatgaatttaaaagttgatgacaaagtaaagccaattaacaagactgctggacaccgtgattttgataatagtgctactcactattcgatgttggaaataaagcaaaactttttatatgtaatcggagtcaatgaagaagaatctagaaaagttaaggaaatttgctattggtgtggggtgtatccaggtgcaccgatggatataaaaaaagattgaataaaacaaacagcggtttcatgacattccaaataagcaaatacctgccaaaaaacatttgactatttaaagtagtcaatatataataaaagtatagaaaaaattgaaatgagggaacgagaaatgaaaacattagttcatcaaattaaagaaatcagcaacaatcaaaaagaagagattaacggatacacaatctttaaaagaaaccaaaatatttgtacagtatctaaattcggcgaagtgatgttcgaagggaccctaatagaagtttcagagtatataacaaagaatagacaggacactttaaatagtttttctcaaaatgaaatagagactctagcagaagcaatgggaaaagataagagaacgattttgtttgatatagaagatagtcgagttacagccgaattataccgtgaaagacttgcccgtgttatctagctcctcagggggagaataaaccgcattaagccctgagcgttcctgcttatgcaggaggttgttagtatttttaaattcttgaatgggagatggaataattatgacaactttaaatgaaaacgtccttcaatttttactggataatggctttaaattaaaagagtacgaagatcaggggttaacattttattcaaaagaaataaaagatagtcaagctttaaaaaaattgattgagtatcattatgagatcgaagaagatgaagatattgtagaaggcgataccacctttattatggagattcaaacaaatggtgagaatccacaatggctttttacaggcgaacatgacatgttcgacattcttgacgatcaagacgacttttttgattatgtaaaagggattgaacgattaattaggccaactgagtagctaaagagaggggaaatacaatagccatgaaggttaaacaattgattgattcattgcaagagttgatagacaaaggggaaataacagaggaaacacaagttctactcaatacatatgacgactgcatgtacgaagtagcatgtgctgagccactgggagagtttgtacaaatagaagctaagattaaataaagaaataaaacatgtatttaaagaaaggtgattaacatgaagagatggattaaatttgactacgatgatggagcggaagtttcttataagataaacaaccctgatcccaatggagagattactattgattttaaggtgaaacagtcagaagaagatgttaaagagtttcagctatacgatgatgaattagagcaagtatacaatcaattacaagaaatgaaaaaagggttgtaatgggatatagcaaagattttgcaatcaatcttgcaaatgagagagcaaacaaacttgggtttaagcattatgtcattcataatcctaaagattatagagaaatttttaataatacaggctttgttgtggcacagacggtaaaagaaaatgaaaagtcatctattgtttacgaaacagaatgaaaaggggagataaaatggatgagctgctaatcaagtgtgaagaatgcgggtataaatggaatggcgatgactttgatgaagactgtccatcatgtgaaagcgaaaatatcaaagttattggatgaaacgttagtattccaaagcctattttaaataaaaacaccattttaacttgaatgtaattaataaataggcagccattattaatttagctacactagcataaggtatcaaaataatggggtgatgaggacaaatgttcaaagtttatttaggaaacgaaaactgcactgcttgtggcaagaagcataaaaaagtgtttgaaattgatggaaagccttatggatctacctgtgcaaaaagattgtttgatattgatctaagtgctcctgcatggctttatgaattagcagaaaactgggtgaaagtagattctggatacaccaaagacaattatgattgttgcactctaaatttctttaaccatcatggtttagagaaaggaggaaagatagaggataagtttggagagtcgctactgtggaataaacccgtcaaaataaaaggctattcaattaaggtagagtggcagtatgaaataaatgattacatattgagaaggtatagagagctatatttttaaatatcctataagggggagaggctgtctaagtaaaacagcctttaacttgcttttattgttttattgctcaaattgttttcactgtttttgcgtaattttaatgctggcctttcaactaatctatatgaaagaaatgcggatgcagcagtaacagcaattagggctatgatcagcgggtaatcagacaatgttttattaattccagtgtataagaagatgttgataatcaccatgtgccatatgaaaatccccatactgatatcatctaaccggttcagctgccaaaatatcttcggcccattgtaaccgaaccagacgagtgcatagctcaggggtacgaaccataaaaagctccatagtgtactgtttattgcgctgagatgtaaaaagtcaattttaaagaataaaaataaaattactgaagataagaataaaacaatatgccgcggtgacttgctccatgctttagcccagaagatgcccaaagtgaaataaaacatctgcggcaggaaagaatgtaagtacaggttaccgaagacactggccggcgcacactttaaaactatgaaagaagctaacacactgaaggcggcaacagcaaaagagcaaagaatcatttttttgaatccgaaacgtttataaaaccaataaatagcgggtaacaccaggtaaaagctaatttgaacaggaattgtccaaagtgaatcgttaaggcgacctgtgccaatgtgatgaaatatgtcagggaagtattgagggtatagcacaagattgctcagaagccatatccagtaatcttttgtagtgaatactgttaatgaaagagctcctagaacaattagcagtacagtggaggcaagagcataggtgtatatagcaggggcaattctaatgattcggctccaataaaaatcggttacattatttcctttaagcctggatctctcataagaagtgaaaagaaaaaatgcacttagaaaaaagaagattgatatgccggtgtgaaacgatgctttactctctggggtataaccaaagacagaaatgtttaaatctcttgtagcatggccaaccaacacacaaagagcagcaaacagcctgataacaaagaaacaattagaatgctttacgttcattaaaagaacctctttcctataccatatagcgaataagcagtaaggctgcctataagcagtgatgattatatcataaaaatggaagaaacgttcttaaaaatgaattaaataaatatttttgttctctataaaggtttaatatcattataaatacatgtagatactcatagatttatgaatatctagctatatcatagttgatacagaaaaatgaagaatctgtgtgcctgttcgctctactttaatctcaaatgttgtataatttgggaagagggggagtggatatgaaaaagttgggtttgagtattgttgcagtgtctttaacttggtgtttgagtagcggaagtactttggccaagattacaaaagatgaacataaggtcagctttaaaatgactgagaatgaaacgggctttttcatggctgatgacaccaatctcgagtattggccaactaaattgggatacaggttcaccatttacaatgctgaaggttgtacattaaattttaaactccaaagaattacactggcaggttatgattttactctaagtgaaaagaatttcacgggaaatcatttgaacttgagcgcagaggataaggtgaatggtgatgcaaacaggaatcattacttaagtatcacaaaaggaaccggctgtggtgacgtctggattaaaggcttttatggattcgaacatgatgagccggatgatgattggtaagtttaatacatagtcaaggtatatccttgaccttttttatggatataatgataatttaaagtgatcatacataatgaatgtggggtagttaaattgattaaatcaaatttaaagccgatattagacgaaaggaatatcagtattcgaaagctgtccaatgatattgatcatggttttaacacagttaggaagctttatcacgatgaaatggagcggtacccaagggatctgttggataaagtctgtacctatttaaatatcgagttgcatgagctgctgacatacaaaagggatcaaaatgcttaaatgtttctagtgtgtcgtcttaaacattcctcattaaaatataaagggagattctgaaatgattgaattcaaattaaagcaactagctgaagaaaaaggaataagcggtataagggaactatctaggattctcgaacacgattataaaagtgttcggttgatgtggctgggtgaaataaagcgggttccaacagatctaattgaaaaagtgtgctcctattttgacgtcacaattaatgaactgatggaatttaaaaaagatgaaaataatagaaaaaagcgttgatccgttttagggatcatgatatactaaagttacaagttaaggaaacaataaaaaacaatggaaaagagagtgaagagaatgaataatttagaacaacatttaaaagagcaaacggatgcctttctggcagattgctttaatgaattaaaacagtggcgggaatctggtgtcttagagcaagggaaggttagaaatttacatgatacttttaattcgaatatcactcaactacatatgattagtgaagtaatttacagggagatagcatcaagattcgttgaaagaatcaagtgaaactagagaataaactaactcagaacttacaaaggcctgcaacttatacatgaatggaggaagaattacaggcgactttttaaaagcagtatatttcacagggaaaaggggagagaaaacatgaaggattattcagtaaagttctacgatcaggactatatgcttttatccgatataattaaagccgaaagtttagaagacttaaaaatgagtgcggaaagtaaagcgaaaaccgtgatggatgagaatggagttaatgagatcacttggacagcaagtgaggttgtacttaaagggaaggttatggagtaggaatacaaacttaattagaggaggaaagaccatgataaaacaagaagaaatcatcttaatggaagcacttctaagagatgtaaggggtaactggtcagatgaaatcatctccaggttgacagagacaaaccggattgcgaagaggtacaattttgaagcaatagaggaagaaactcgtgcaattatagattcagaaaaggtaggaaaaaataagaattttgatgggagatgttttatatcagactataaatcaggcggttatgaaggcttgagcgaattttatggaggagacggcaattttaaattgaaggccaaatcaaaagaatttttgcaaaaagtggatgaactgatgacaaatgactggcttatctttccggattttgacgaatacaataaatgcaatgtttaaataaaatcgtactttcataaagaataggagaaaagagatgttgccgacttctttaaaaacaaaagttcagcgaatcttattacaaggtagctttaaaaaatctgagagctctaaaagcagagtaaaaggactaagcaatatttctgcgggttttacttttgccaagacgtttgacgacgattactgcctctattatacagccggtaatatggctttccggggaatgcctaacgaagaaaaggataatcaaacagaaaaaatgtatcagttcttattggatcagggtcttcaaaaaaatattgaattgacaaagtttagaaatcaaaaagcaatcttgttgaaagtggaataattgcgagacactttgaggaacagtataaaattgcactttacaacaaagggagtgatgaaaatgagagaggaaattcaagtgttacttgaggaaattcaagaattagaaatggctttaagcaagtccgataataatactgtttcagctgttctccaagaggcaatcgataaaagacgtaatgaaattggcgagctaaagccaaatgggtacgtcatagcagacgtagtccttaaagacggtaccgagttaaaacggtgcttagtttttactgtaacagatcgaatggggtcacaagctgtaactgaattagttgaagcaagagaaatcttcgaaaaagataaagcggtttatttgcaacaggaatatgaggatggaaactttgcaggggatataggagtacacgaaatagcaacatacaaccttgaatatgaaaatggtgtcaatgaataaaaaatctttaacctagatagaggtgcaatatgcaactaatcaatgacacaattattctaactaaagaaatgaaggatattttaggtgatgtggtggaatatgcatacataaaaatgccttcctggtcaagtaagcaagattttgaagaagtctactcagagatgttgggacaaaaggcaagaatagagcccgttgattcctacccgattttcgttaaactaacaaacagcaaaacatttacactttggtcatctgagtggggcggaataagatctgaaacggaaaaaggatacttaaacgagtaaaacaattaagttaaaatcattcttttatgtggaactaagacaactgtggacgaaaaacaatcatcagaacatgaaaaggtgtttaaaacgcagatatgaaggagtgaattaatgaaccagcttacagatacaactaataatatttggagggtaatcaatagacataagagattgataatcgctattgttgtaatcgctactgttgggtacctcgtgtttggcagaagctcaggattaacacaggagaagtttcaagataaaatatacaaagtttcaaacggagttattgatattaatgattcgaaaattgagaaggttaatgatgggtcatctgtctatatggccaaatggaatggtttcacaattacggcatctgtagatagtaaagaccgtattatttttccttatggtgttattggccttccttcaaatcaaatggatgaaatttccttggggcaataccaagaaataatgaaagcattaagtagtgtagcagattcaaaactttctgatgaagataaggaacggttaattttaaatgaattgaattttaataatgtaattgagacaggaacaaaacattccacctctaaaaatggaataaagtatgaattgattggcacagagggtgccttattatttatgcttggcaataagaaataattgtgaaaaatcataaatgcacaatgagggagaggatgacttatggcagccaaaatgataactgtctggtacaaatacgatgataaaggtagcaaagccaaactaaatcatattgaagatggatgggtgaatgaagaatatccaaagccaatagatccgtcattcacaaatcaagaagcatggaagaaaagtgattgggaaaggaaacatgcttatttagatggacaacatcgagtattgagcgttccaccagcaaattggattaaataatgaaccagcagggggagtatgcaaatgatcaaggtttatacaagaggtcataagataccagaaaagattaagtcttgcatctctgaatggaattattggtcttggattgtagtttccaatactgcaaagaggaacaaggatgcgaaacgactaatagagaagattgaagctgatccagacaggattgcagaatataaaactgaagacggaattgaagtatatgtaagctacatggatccagtgaaataaaaagagcattaaactaaatgctcttcttcataccacacctacgacactcacgtaaaaacacaccacttttcactgaactcttgaacaaagcgtaatcacagttgtcacagcgtccatatttaacatcgggatactccttataatcatacacaactgttacatcgtagccattcgtctcaaaatctttcttttccattaaatttcacctacacaaagtatttaacactactataataccagacgatgtatataaggagggctttaatttgattggaatagcatatttcttaatagtctggcttggtgtaggctttctgacaggatttaaggccttatttgttgatcaggtttatgatgaagagtttaagcaggaactgattgattcattttcaccaggtatggagcagaatttgattgaactgttctttaaaaataaaataaatatcatggtgttttacatactgattggattgctgccactggccataaaaattgctggtctgctgaagaggagttagctatgccggttatcgataacttttttgttattcaatttgaaaatgatgattacttcaagtcatttaaattagatggaagtggttataagacatctaaggggcttcatggcgcttctaagttcactacaatgtcagaagctttagtgatcgcaaatgagctacatacggagtttaaagccacttctgccataaggcaaattgaagttattactaggtgaggagtgttcaggtgtactggattgaatggattgaggatggagagaaaaaaagcattgttgcggatggatggattgaatgggccacaatcctggaagacctttatcagcagcgatttgaatatgttgaatggaataccttgtgaacggatgaaattaactcgtattcaagaaaggaaggttagattttgattgactttttatataataatattcagtggatttttagcggtgtcggtctacctattgtaggttggatatgcttaaagtggaagaaaacaaaaaaggaagacattcatgatacaaaatataatcaacaaggcggggacaattcagttaatattcaagggtgtaatgtagaaataaatgattttaaaaacaagggtgataaatagatgaaaaagacttgctcgcaaagtggaggagatcactccgtcaatatccaaggagagactgtacatgtaacggggctatcatatggagatgcaaaacaaatatgtaacgatattttcaaagaaaatttttataagctttctcaagaagctaataagattgctacagaaagagcaaatactttaattgaaggttttctagaacaattttctaagaatcccaatttacctaatcggttttctgatcctgacttgcaatatataatttatgtagcacaaagggattttgtaaggtctggcgaaaaatatctataccagatgttaaaagaattattagttgaacggactaaagaaaaggatagatcgtttaaacaggtagttctcaatgaagcaatagaagtttcttctaagctaaatactgaacacattaatttactaagtctgcacttccttttatctgaagtaacttttccgtgccaaacaataggagaattaaattgtttgttaaataaatatgcagtgccgtttctgccaaaaaaaatcccttcattaaaccagatgatgcatttagagtattgtaaatgcgagaacttaacaaaaggtcaaaatgagcatttttcttatttgattcacatggcatacggtgggatatttcaagctggttttgatcttgagcactatcttaagacatttccttatctagattcaaatatcctaaaagaaatggttacgcctctttcagacgaaaataatttatataagttcaatgttcagggattttttcatttattagataaaattgaaattttgggttcagtgtttattcagcatcaaagtaagattattgatttttataaaaaccatcttaaatcagaaaatgaaataagtttggctataagcagatatgaaagtatccgtaaagtaaatgaaatatgggacagaactactcttcctgagtttagaatgacctccgttggaaaggttattgctattactaatcttaatcaaaatacagatttagatattaaattagaagaagccttagctaaataaaattacaataataaaagacacagttgtgaagaaaaattgtgtctttataaaatacgaattttaaacagagaaggattccttaaaaaataattagaataaaaataaaataaatacttgtaattctgacaactctaatgtatattataaacaagggaacattagttgggaaggggtggagtaaccaatgaaccttaagcagatgattaagaatgaatgtgaaaaagacaaccagctcgcagcgaaactctcaaaaatagcagggtacgaaaaggttaatggcttttacaaattcatcaacaccccagagaaagaaatggacaacttaggcggtttaattaatattgttaaaagcttgtttcctgataatgaaaagcaacttttgagtgattatttcttgtcattggatcccaataagaaatgtgctagacaatctgttgaatatgcagatttaaatcagtggaatgcattaactgataaaataattttaaatttatgcaattcaaaaaatgcgacaagcaaagaatggggtaagacctataatatacatagaaagttaacagaaaacaagatatccttaactgaagcaatcagggaaactggaaaatgcaaaacagcagaaatgatattcttctcaaatgcaatgttaatgtatgaataccttaaaatcggtgaatttggattaatgaaaagtacagcaaaattgctggattttcaagaaatatcagacgcttacataaaaggcttgtacacctccagagtaagcttgttgaaagctaatataagcttcaatgagaacaatttaattgaagcaagaaaatattgtttatatgccactgaaactacaaacgtggacaggatttgtttttttgcatatttaacaatcggaaattcttttatattcgaaaattttgaagaggctaagcggtcttatattaatggtgctaagtatgcaagtaacacaattcacaaagagatgttagaaggagcattatgttttcttgcaagcttttgggacaaagagaatttttgggtgaattatgaatcacagaatactaaatacttgcaattgagggcataccattatatacgaaaaggtgaagttgataaagcaaatgatattttaaatgagttatcaataagagaacaagatgagaatgagatgggattttatttttattatagaggtttaatatctgtagataaatctgatttttataaatctatacgctgtttcaaaaaatcagatgacaaatattcagttcaactgcccttgattgaacttaaaaaaatgggcgcggacatagaactgttaagtcttatttcaatttagagcgatgcaattgaaagggggtgaggttgttgaaaaaaacgattttaggtgtagctattattgcggctctggcattatcatttgttgcaggacaaaaatcagtaaacactgcagctccaaacgatgaaattagtgtagcaagcatcattcgtggggcttaaaaattcacaacaacgatactacataatcaatggttagacgtttgatccactggatcaggcgtcttttctaattttaagagaatgttccagaaattcataatataaaaaacaagaacatggaggaattaaaatgaaaaagcatttcggacaatcactttcttatgaggatatggccaaaggttacgaagaaatggcggctattaatcttgtaatttcccaggaagacaatcatcttgaaaatgaagcagaaatgattagatcaaaatataaagcaaaggtatcctaatgaggattaaagacaaatcagcagacattttaacacatacataggggatgtgttatttgtcgtgaataaaaataaaataaattattgcatattattctagcaacatatataatgaagttacaagatgaacgttgttgggagatgaaataatggaaacaaccagtgccactcaaaaggaagagttgaagattacatcattaagacaatatcaatacataaaacaactaaagaacttcacacgagtcaatctccacctagaggatccagatgtgtttacacctaataatgtaactacaatgagaaaaaatcataaagaatataacctcattaaagaacaaaagaattctataaaatgcatttaaggagtaaaaataaaatgaataataaatattatacagaagaaaacaagactaaagtttggaaaaagcatatgatcgttttgaagtttctagagcagcctgagatagcagttgcttataatgagttcttacgaagagaagcgacaagtgatgaatgggttgggttcgaagaggagttgtatgaggaactgacggggatgccaattataaacgtctgcaaggatgagagggtaaatgtcctaaactgaattttattatagaataaaaataaattaggtgtgataaaatgaatacgggcatcttaattaacgctcttaaagaatacgacatgttaaagcaaatggaaatctgtaacgccaatataatgctgctgagtaatattcaaggtgaaactgaatggattgttgcgtggaaagaatttgatcaatacttaatgaaaaaaatgatatgaggtgtcattatggaagctcaaaagaaagcgtcaacactaagggattattcaatatacaacaacataaataggtggtttgatgaattagatttaagaaacagggatcgagaaactggagaaattgaaaagtctaatactagagccacgtatgagaggcatataagagagtttttcaaccactatgctgccaaggatattgaatatttaactgagagtgacctggcgattaagaagagtgacctgtatgattatcgaacccatttggctaaaaataaaagtaactccaattcaacaattaacaataagattgccgcactgaaaagtatgattaagtaccttgaatctgaacatgagtgtgattcatctgtatttaattttagacctcttccaacagaaaagaacccagcagggtcttttgaaggaatatcggaagctgatgagtttgctgaggcagcttatgttactgagcgtcagaacagattaatgaaaaagatgtttattttgtttagtgcacgtactggtgggcgtaaatcagaggtgcttagagttgggtgggatgatattacttattcagaaaagcaccaatgctatctcgtcacctttaaaaaaactaagcaaaaaaaggctaggccagttgggatttccactgctttttatgaagagttgttgctgttaaagcaagagtatggggaacatgagcttttatttcataagttaacagttgattcaatacaggatatgtggaatcgcgtatgtagagttatgggcattcccaaagaaagaaagataactccgcatagtttacgcaatactgcaacaaacttttcttacagcgttaatggtgatattaaaaaagtggcagcgttctctggccacagtaatatcaatactttaaatgaccattatttagtcaatgaaagggattattctcaagatccaggggttttggttgatcaaaaagaagacatgtcctttttagaagatgttactttagagcaatataaagaattctttttaaaatcagacatgtatatacagaataaacttaaaatgtttttgaacaagtgatacaaataatcatataaaagctttacttgcttatgaaaataatgataaatttaatatgattatgtgaggtgataatgtgtctgaagttttgttgacaacggataaactttataagttaaaaactgaaatagaggaaaatcttaatgatattaaaaatgatcccaatatggtgaaggaattaaaagccacaatggcggacaaatacaaggcactccctggttatatccaagaaattttaaataataatgataacaacgtacaacgtttaaacgaaaaagaagtgtacattgtttcaaaagagatgtattcaattcttggggcgcaagctttagatccgtcaaattattttccaaccagattggcaaaagagcttgaaggtgggagagtattcgccggtgaagaagtagttaagcttccatacaagtttaaaaatgtgattaaaattaaagaggataactatgtcacttccattactgccaaagaactgagtgagttatataatagctccatcctgcagtacaattacaacattcagcgtgaaggaaagtacattaagggtagccttattcctgtacctaaaacaaaccctaaatcagttgatgagatcaaagaattgtttattaaaggcgatttaattgtatcaatgttaacttttaacgctcgtcttggaacatctgatggtgatgaagaagttgaatatgatccaagcgaccaatccctcactgtaacacgaggaaccttattagatgctcttgatggatatcatcgaatttcaggtattgttaaggccattgctgaagtccctgaattagatcaaccattcattttaaatgtgctcaattacgatgaagaaaaggctaaggttcactttgctcaaatgaataccataaacccagttgaaaaatccagaattgaagaattgggacaaaaacggtattcttcaaccgttgtcgagcagctgaaatttaaaagtgaacttaaaaataagcccacaaagtgaaattggtatcgatagcaattttcttgtgacatattatactttatcagaagctatagacgatgcatttgagttgaaatctcgaaaagatgcgttgaaaattgcgaaatacctggtagactttttcgataaccttttttatgccttcccagatgaatttcttgaagatgatttatcgtccattagaaagcaatcatacattaatcataacgtaatgttttacggttatgtttatttggccaagaagatgaaggaaaacaatgtagaactaaacaagcttgaaaatatccttaatacgattgactttagtaaaagcggaagagtgtttgaagaattaggaagacaaaataatgaaaatcaactaaagaatgttatgaagaagaaacttaagcgaatattttatgatgaaattgctgttgtttaaagcctaaaggagaatttaatatgagtgaaatgtataatgctgaattgaaggaaaagtttttagagaaatacgaaagtgaagcaacaagaaaccattattggctaaggctaagggatttctcagctacagaaaaaatacttcaaaaagacatatttaatttttctttggaagagctgcgtacgttatttttagatttagatagcaaatctatagattcactaagaggagcaagagctgtaattggacaatacacaacctgggcaatggaaaatggcttggcaaacagtaacatcaacaaagtgtatcagatacaggatggggacttaaagcagtttatagataaaaacaaaaaaacactattcaccaataaagaagtagaagaatatgttgattttatggttaatgatcaggataaagcgatgatacaggctatttatgaaggcatagatggttatcagcattcagagttactgaatttaacaggtgacgatttacttgatgataacaaggtaaagcttgtagatgataaacacggtgtaagaataattactgtaagcgacaaatgttatgagttgcttaagcgcgctaatgatcaaacaacatatcatcttagcaatggttcgccagagagtggacttaaaaacaaatttgctacattagttaaaagcgaaaatatttttaggttaaaatataagagttctaatcagagtatgaaagctgacaaatttttaattcaccgttcttttagtcagtttcaaaaatttttagaagaacccttcttttcacctaagaatcttatcaactcaggaaagctcaacatggcgtatgagatatacaaagagaagggtgaattaaaagtacctgattataagaaaataactcgacaatatggattcctgaatgaagacgcggagtttaattcacaatcactgaggaaagtagtgaatatggagaacttagaaaaatattgtatcaagtctgaagtaattgagactaattcttaatccctgttacagggattaactttacataacttttagagtaaaaataaaaacaatgtgaattaactcgtgatatttttaaaaaaatatcaggattttgttcatatttttcagaattcgacaaagttagacagagacaaatttgtacatatgcagtaaaatagttctatacactaaaaagggtacaaggaggttcgctaggtcaaactccctagcgattaagtcaatgtttgattttccattcatagaggtcttcaatcgaacagtttagggcaattgcaatgattctcgctgtttttatattcatagaaggtctaacgccattagcgtaatcacttaacctttgcttactgatgcctgttaggttcgaaagttgccctagggacattcctctacgttcaaggagaatggatatcaaacattgtccgatttcaacctcaagcatcggacaacctcctgatatagtattgcttatcatactatatcaattctttccaagtttttaaatgaaagaaaaaagatttgccactaactaggtaaaaggttataattaagtcaacaaaaaagggaacgtaggttcggttaattactaccagagagagggaaacgtatgtcagaaaaggattatttcattcaaggggagctgtgcataccttttttcggcagaataaaagccaagaatgaagaggaagcacttttgttcgcatatcaatcaattaaaaagaaattgagaaataaaacaggaaaaatggggtttcttcaaaaagatcatgaaaaatatgaggcactatttgatgtagatattatgtgtacagaggatgctgaattaacaacctcttatgccgaagaaatagacgattcgtttgaaaatgaggattataaatcttcacaattgttatcatcgaagtaaaaatacatacacatcttgtcagtcatcatgagacataaaaaattggtgactttttagtcagactggagcatacaatggattttaatcttgaaattgacttgaaagacattatgagatcagtttccatgagtgttggttctaagaacatccaaagtggagagtactacatagacattatttttaaaaacaatggggattgtttgaggattagaatggatcatgcttcagttttagaatttagagacaaaataaatgaaactctttggaaactagacggcatgaagacgtttatgaagacagcagctttacagtatgagtaaagctgatttttttgaaatttttaagagtaaaaataaaataattgtttacaacatttggttggggttatataatcgaattagaataaggaaaggagatagctttaattattgattaatgaacaaattaacgatcaaataagaactatggttttaaggaaatatgaaaagctcttagcatcatgcgaaagatctttgcgcagcatagagaataatgaaatcagaatggcaataggagacctggactttgttaaagacaatttagaggaaatacaatacatacttcgtgatgttgtgaatcagcatgaatatattaaggataaaaataaaatgtaagttttatagagattaagataagggggaataacatgggtgcattaatcgctaagcaaccgaatggacggtactgccgatttagttcagtggtagactgcccaacgcacataaatatgacgcgtgaagactatttaaataattttactgggacaacaaaaggaagggaagatgctgaagatacacttgcaaattatctccggccgtttcacgaagttataaagtggtacacaccgctgaacatgagcgaaaaagagtttgtggaggcgttaaaagaaatgtgtgacgaaaacccaaaggaggcgcgggaattgtgaaagtgaagcgtattgaatataagctgtggtacgaagttaggttcggatggacgcatttcagtttcggcgctaatgatgataaatctgcattgaaatatgcagaggaatacgcaaaaaataactacctcataaattataaagtggaaaaaataacgaatgagagattgttttggactgaggagggtgcggagtgattagagcaacagaaaaacagttgagactgatcggacgcatggagcaatacattagtgcaagattcaccggtaatacaattagagaagcaagtgagtttattactaatcatatggatgaataccaagaagagagagaaatggccgatgaatcaaaagttttatatgatgatattttctatgaagaaggttggtaaccttgccgagaagtattgagatctatataaaagatgcattttaaatagaaaataaggcggtttaataattgaagttagtcgagactacattaagaaatcgaattagagagatattaagtgaaaagggattaactatacatgatctgtcatctttgaccggtatcaacgtgcaaaaattaagttgttatgcttctggtgtcaaatgttctatgagcattcaaactgcattacaaataagtagagggctgggtctatcagtagaagaaatcttttacgaagaaataatttatcaccgggaacttatgaagggagaactttcatcatacatgaagacggaagaggataagcaatacattatacaaaataattacacaacaaacatacagtacatgcataattctcatttacatcaaggcaacaattataatgctagtgatttaaaagaatcgttagccaaccttatatatttatttaaaaaggagtacgaaactttaaatttgaaatttgatcaagctgctttatcttcggatgccattaaagggattgaaaaagagataggcaatgagtcgcctgataggagtaaactcattaagtttttaaaaatcttaaaggatgtaataaagggagcggcatccacagttattgggggacaaattaatacattaataaaatctataacagaacagggtatggggtgaattgatatgggaatgtttgatacctttaatggtcaaattaaatgtcctaattgcgctgcaatacacaacacagaggttcagtttaaatggagtgaatgcttactattagactatgagttgggggatgttgtttcaggagcaccagaaggtttatatgtcgaagatgattggtttaatgagaggtgctcaaattgcaaattagaatatatgccgaatgtggttttgaaaaacgggaaggttatttcatttattagcaaagaggagcttcaaagagcagacatagctcaattaaaagatatcccattaaaacatgctaagacacaaaggtatgaaagagataaaatcgtcgccaagggttttactaaagagtctgccgattttaataagcaaccatttaaggataagcaggttataacggcctttgagcgtaaatggaaagttgtaaaaggctggagaaaggattttaatccagaaaaagccagtgaatttttcaaactaaccggttgtgcaacaaggaaatctgattactggttcgtttatatagttgtagatgctacaggattgaaacgctttgttgaagtatccgacagaataaaacattggtcagacaatgatgacaggtacggtaatatgctattcagtgaaacctatggatttaaagatcaacactttatatttagcgaaatcttcttataggggttgggaagacttaaaagttgtattggcagcgggagaacatagggaattggattaaaagtaaaactttatttagatattaaggagtaaacatgacgagatgcacatttgttaacgatgggttattcggtcaactttatgaaaatgaagtcaatatgactgaattagatataataacatacatcacaattcaattagtggcagtaaacagaaatttcaagagcaggcaaaagttatcggagtttatagggtgtagcaacaaacaacttaaagtagtgttggataggcttaaaaatttaaaagggacatgtaacagttactgtccaaagtatggagacgaggtaaagttaaatgaaaaaggacgtggagtttctaagagcttagttactgaaaataaagaaattgtttatgatgtcatatcaaaaagaaatcgtaaattaatatcctttcgccccaactacatgccaaactatagatatgacgaagggttattaaaaccactggaattttttattgttacttcagatgatatgtatctccttaagaatggtttattgacaagatctgaatttgttacatatttgtttattcttaaatcatatcaatatgataaagagttaaatgatcaaacttttttaagttacactgacatagcaatgaaaacacgaagaaaactcacccaaactacacatagccacatagaaaaactgaccaggcttaaaattgacggtataccaatccttaaaaaatttgaagcagatagccatgaactctccgatagagggttggaacctatttcaagatttgtgcctgtatttaatttagaaaaatttaaagaaagtagatggaaaaatgaaatttgaaccaatggataaagttaaatttaaaacagctagtcatttcaacaaacttcgaaccttaaaaaaaagagttcctgaattagatgatcctttactcggcgaatgctgggaatttgaaaaagatgggttaaaacaatttgattgggaggagaactacgaatttgtcgctagacccaaacattttaattaggattaaaaaaagaatctaattgaagttttaaagaaaagaatgacttcggagtcggcagacgctatattaaaattaagtgattaaggggtaataaacacaaaacttttgaagtttagcagggggcatagcgatgaagattagacaaagatatgaatgtggggctgataaaattgctattcagtattccattgatgaaaaagggatgattaccagccttaaagaagtgaattgggactcaagcacagaagcgggcgagctcttacttccgagaattgaagttactgataactgctttaataagataattaacaatcccaaaatggtttaagacgataaaaagtaaaatttcattcatttgaaataacggagggaaatgaaggtgacggaatcacaattaaaggaagaaaatgaaaatttaaaaaggcaagtggatcatatgaaagaggtctataaagaaaatatgtctcttcacatggcagtaagacagggcgaacagctaaaggccaacctacaagcttatttacgacaagatgaccgagtatatagtcctcatttcattacaccaaaacaaaaacaatatattgtgactctgttcaaaaaacatggcttgtctccactcagtaaagcaaaacgaaaaatagttaggcggtttaatgggggcggtctgatttcagagcacgaagcacaccaagttatacaaatgtatgaaagaaagtaatagtgaatcttggtttggctgtttcaattgtaaataagaaggaaagaaattattaattgagcctacagaatcacaataaaaagactgttttaaagaaagggtgagaaccgatagtcaatttcaaaaaacttagtgatcctgaatatattaagcagatgggaattgagagaaatgaacgtgagcggatatatcaagaaaaggagactttaagaaagaaaacggtgtgcttcactggtcataggccgaacaaattgggtggatatgatatgaaaaatccaacaatgcttaaactcaaagaaaagctgcttgaagtaattgaagaattaatcactaaggaaaacaagtccaggttcataactggtggagcattaggaactgatcaggctgcttgttggtgtgtacatattctaaagaagaaatacccacatattaaaaacataattgctacacctttcaaagaacaagataaagtgtggtctgaagaacaaaaaatgtggtacaaacgtatgcttgatgtggcagatgagattaccaatgttgaagaattaggtaaatataaagttagtggagctgtatcaggggaattttcatcggctaaaatgcaaaaacgaaatgaatacatgattgatcacagtgaagcaatagtagctgtctatgatggaagtaaaagtgggacaaggaactgtctgaattacgctaggaaaacatacttaggacatcaaatttggaggctacatccgaaatgtgattttgaattggatataagctatacgcctggatgaggaggaacatataacatgaaggaatttaaaattgtgaatttagatggagttaattggggatcgcataatgatgaaactttagatttcaaagaattgattacaggaggaacgattgcagtaggcgacgttgttaaagttgaaggactaggcgattgcccacttcctctaagggagaaccaattttgcataacatttaacaaagaaaatgaattgtttcttgaagaaccattcactttagaagaatgcaaatcattgtttggtgcagaatttaaatattgaattaaaaggattatttcattgtaaggaggaaggcacataggttatttaaagcacataattgatacagcctggtttaatttagtttggtttagatggcaccttggagcggacataagcgtatttgacggctgcggatggaatacatatagatatttgaagaataaaaataaaataagtggaggttacaagggtgatcaagaggaatctgcttagcaaccacgttgatgagattattggtgaatattacgctgctaaaggatattcagtccatagcattgaacaccaggaaaatggacaactgattgttgttacggaacgagtagctgaggagaaggaacaggcaaaggttgatattgcctttgattttgtacatagaagaccacataagaagaagtatttagcttaaaaaaggcaaagagtcaaagctctttaccatcaggtgttttccttaaccggttcgcaatgtacttcattacgtttactgcaatcgacactaatgcaataatcaatgctatttcaaataagaggatgtatccaaaattcacattaagcttttcaaagtaatcgctggtaatagagaggattttataaatccctagcataaaaataataaaggaaactcctaaaattacaagtgactttttagaataatctttagcgtgttcaaaattataaatcattattgataaaaataacaaacccgtagcaattttgtgggataacgaatcatcggccgaaaatgattgcactactatgctgatgattaatccagtaataccgattgttttattcaaggaatcacccactcgtatgtaagttaggtatgagtttaccaattaaaggggattttctcaagatgatacacattaaagttaaattaaaatgctttcacaagaaaggggtggaaacatgcttggttatcagaaagggaagcaagtaaggtggcatgaagatggggagatgggaattatattgtggacgacaaatcgaggttctgtgggagttaaatggagctcgggtgaatacagtgaatacaattataaagttgatgagttactaatattaacagattagtattttacccaaaagtgaacgcatgacagcaagaaaaaggtttagtctaaatgaaatcgtgattttaaacagataggaggaaacgatgaatcaagatattcagtttttaaaagaacttcagcaagagttgaaaaatcaagacaacgacggtcaagctgcaccacgtttctggacagttggtgattatgaatgggtcgaagctcgagaggaaaatgcagaacggtattctgtatacctgccatatattgcagaagctcatacttacgcaatgacagcttggagggcaccgaaagtagagcggctgcttaaaattctcgaaacgtttgattggagttcaataacgatatctaaataaaagatagttttcaactaaacatataaggatggatcgttatcgaaattataaaaatccgataacgatcgcagaaggggtgttaatctctataacgccttctttcctcaaagtcatcgggatactcattctgctttgacttgaatacaaaccaaattatagcagctagcatgtaatccatgactttttcaaaagtccaatttgtgaaaagatccataagaattttcattgcctttcgcctcctgagacaaaaatgtcctatctctcttagatggcatgtgtatgacacgcatctattaataaaagagtgaaaagcaatacgaaaatcaaaaaagaattgaaaaaacataaaaaatatagaggtggagtaaatggcagaaactaaggcgaacacaaatacaaagattcacgtattggttgatgaaaaactaggtggcaccaagcgggaatacattgaggtcgataggaaggcggaggtcggggagaatatcataatcgttgaaaaagtggatttcgaagaatggtacgaaatcggcgatatttttacggtagaccgtacttaccacacagcggatggagccgtgtattgcgacgacgcatcatccgttaataatacttacggacttatccatctctcagaataccgggtactcgaaccgaccgacatcatccacattaatggaatgcgttatgaaatggttgatcgcaaggcggaagcgggcgaaaaggttattcatgtttataaaggagagtcgaatggcattgtccgaattgtccgcaaagccggcgatgatggagtagatgttgatacatacgaagatgagggagaattatatagcggcttttatcatggacattattacgttctcgtccctctagataaagagaagacctttgaaaataaaaatagtgtatacaaagaagtcaaaaactacatacataatgaattaggtatttcaaagcaagacgtacaagaaatgattagtatagcggtttctaatgaagttcagaagatgtcagagtcaggaaaactggatagatttgcgggagaaaagattgaatcacttattgaagaagggtttagaaatggagatcgactgctgtatggatttaaagaaagggtgtcacaaacagtttccgatgaggtgggtaaacggattgcaaacgtgttaaatattaatgtggaattaaaggaggaaaagaattgatcaagaacgaacgagaagattatttaagcaggcttgctgaatacggattaacagaagaagaggaagaggaaatggccaatattttaaatgattttgtgggctatgatatttggtgatcatattagaatcaaaataaaatagttattttatagaaagaggggaagagtgcagatggcatcagaagagcaattgagacgaatgaacgacataaacgatttgatcaagcttatcgcaagcattgatcatcgtacattctaccgcaagtcaaaggatcgcatagcgtatttcagatttaagaaaaaactgttcttcgttgatgattacacaggggatgacgtttacccatatgaaatgggatacggtagtccaaacggtttttcgcatgggggcaacatgtggcagctggtcaacagcttcagaaaattcatcataacagggaaatacggtgaactgagggattataaagaaatatgggcttacagctatgaaggatgtatgaaaatccgtcagaaggcgaaggagatcggtttcattgaaagtgttgattacccctatagttttgatgaatgggcaagttaaaactaattgattcatgtactaaattttcatcaaaattaattagctttgcattaaggaattatgtaacggagagattagactctccaggattcaaaggaaggtatgcggagtttgccatgcttagtcttaaatctgtgtttaaccttacataatatcggttctacaaatatatattcatcagattcagactttatatgtttcatagagtggaacttacttcgttctgctttcggcatgaattccataaatccagctgcagtaccatcaggataagagagaaggaactttatatcctctttggtgtagcctgtgataagcacatctgtgtaatcatagttaatcactttcagccagctatgggaacgtttattgatttcataaggggagttagctttctttagtacgattccttcaagactcttttctttggctagattaaagtaagctaatccgtttccttgcaggccttcaataacaaagacattattatgatcaagcttaaggtctaaaaggacgtttttacgttcagtgagcggcttattagcgattgaatgcccatcaatataaattacatcgaatacacagtaaaccaccttatgggctgatttcttagacataaagcgttccatcacagcttcgaaatctggagcgcctcctggggtagcaacaatgatttcaccatctataacagttccgttggggatatcgagatccaacagttctgggaacttgcttgttacttcattgttgtgacgagtgtaaagctttatctgatcattaaacttggagaggatcagtctaattccatcaaacttcagctcggtaatataaccatcgtcatcaaatggctctttgattgaatgcaataacattggcgatacaaacaatatatcacctcctacttagaacataatagctaagcgaaggtgatatataaagcaaaatgactgtggtaattaatgggattcaatgagctccggtgagttgtttttaggtgagttaactaaggatgaaacttgataagcttccatgtcattagagttgtacggcaacagtaagctttgaagataatcagggtcagtgtttttaggatttagccattccttttcattctcatctgtaaggataactggcatccgatcatgaatgtcttccataagctcattaggctttgttgtgatgattgtgcaagtatacagcggatttccttctgacgtgttccacttttcatataagccggcaaaagcaaagagattggaggatttgagcttaatacgcataggaatcttagtctttggatcaagacgcttccattcataaaaactgtcagctgggatgatacaacgtttgcttacgagtggctttcgaaagctgggtttctcggccaatgtttcagcacgagcattaatcattttatacccgatcttttcatccttagcccaaggaggtataagaccccatctaagtttgcccagacgattatttgatccatcattaatgattgtcaggatgttttgtgatggagcgacattatagcttgggttgtattcgtcttcagacaaaaattggtctatattgaactgttcgatgatgtcgtcaaactcagaaaataaagtgaacctgccacacatgttcatcatcctttagggtttttgaatattgtacaggcttgatacacgaaaatcaaaaaggaggaatgtgatgaagcagcaaacagttgaggttaaagaagtggatgtgttaattagagggatatggacaaagaagaagttcactgatattcaaaaggggcaaacctttaagattaaggagaatggaagagcaaagaaatacatagcaagaacagatccttattgggatgacatgtatgagacttacataattgatttattggataaaaataaaataagtgtattagggtgatgtttctgaatttattgagagatgcacggatattaagaagagaacttttccttggagctttagcgttagtaggtatgaacttgttcgtatattttctatttggtggtttaactgccatagacaatcagaggataataacacgaagaattggaatgtttgttgtaagcattggaataccatgttcttttattctaaagtacttgatcgtttggagaccgttaatccgtaaggtaatggaagagttaaaggaagaagatcagaatgaacgtacactcaagaaatatgaatttctaagaaagaaatttgataaaacagagattttataaagaaaaaataaaataaaatggaggctgcacaatgagggaaattaagtttcgaggaatgggcatcaatgaagaatggtattacggtaatctatcaatcattaagcaaagaatcaagagcatgggtattgatcctggttcttatatctctaataaagctggggttccatttgcttacagtgtcaggccggaaacagttgggcaatatactggattaaaagataaaaatggtctagagatttacgaaggagacattttagaaaaaacttctgagttatacaccaattttgggaaaacacctacaggaaagttccatacttcatacattaaagtgatttggattgacgattgttggggatatgaggttatcgaaaataacggtaaaggcccaatcattgggcataaatggaaagggttaaaggtgactgcaagatattcagtagtgtacggcaatatttatgaaactcctgagctagagtctaaataaaaacgatattttatagaggaatggagtgaagcaatatagatagaacaaatcgtactttgatagagcttgaattaatgattgaagacggaacagttcccaaaagattgattaatcaagtaaaacagtttattcatagtgtaaaagcacaagaaataaacattgccgacctaagacattcctcagcgagaaaacaacatggagatgagttcataactttattggaaaaagctaatcatcagcaatattttaaatactatggtgtagtatgcgataaatttaaaacaaaattttgagattgcgtgcgttaaaagtgatttttaacttaaaaggaggtgattgagatgtaatttatttcagctatctgaagtttataagaataaaaataaaaggaggtgattgagatgtaatttatttcagctatctgaagtttataagaataaaaataaaaggaggtgattgagatgtaatttatttcagctatctgaagtttataagaataaaaataaaaggagtgtttatttaattgaagattaaaaacagaatagtggaattgctaaaaaagactaaaggagcagagaagagagactttggacggtacactctaatctgcccacctcaccgcgaagtgaagctattaaagtataacatagttaagaagacttttccattcttggtgacagctctggtctcattcctgaatccagtgagtattttagcagcggacaagtatcggaactttgaagagcttaaagcgaatgaatcaccgttcaattttagcgtattttcaaaagagcaagactctgatgtattaattcttgctccccatggaggtggtatagaagggggaacaagcgagcttgcaaaggaattaagcgaaacatactctacatatctttttgaagctttaaagacaccaggagcatttgatttacatttaaccagtacaaatttcgatgaacctcaagcacttgaaatgttgaaggagcatgagttcacactgtcacttcacggctacgcaagtaatgatcaacatgttttagttggcggcacagatcggaataaagctgaagcgataacaatcacattaaataatgccggctactctgcagagcttcttgatgagggggcaaggttatctggcagcagtccgaacaatgttgcgaataaaaataaaacaggaaagagcattcaacttgagttaagcactggactgcgcaaatcaatgtttaacaccttttctctaaaaggacgctcaggcaccagaaatgagaacttttataacttcattgacactctgtcacggtttatcaatggaaatgtagaagggaagggtttggcaacatgaacatgcagcagcccttatactattctgttgatgctctggattggggaattgatgataaagggtcaaatgctattgaaacgacagaagggataaaccgagctttaaagtacgcaagctcaaaatcattctataaagtacatataccaaaaggtacctatctaattgatgctgtgaatacatcaaggcggttgcctgaattcggcggaggtattaatattccttcgaatattgagttaatacttcatccagaggctgtttttaaagtgttgcctaatgattctcaaggctactcctgtttttatattggccaagcgagcaatgtaacgattcgtggcggtcaaattataggggatcgatacgagcatgattattcaaaagtaacttcaattaaaaggacacatgaatggggatacggaattcatattcatggcagcagtaatgtgttaattgaaaatgtgcaagtctctgactgtattggagataacatttggatagcagccgatgggatgatgaacacttcaggagcgtatacgccttcaaagaatgtaaccgttcgaaagtgtactcttttaagagggagaagaaataatctggctaccaatggttgtgaaggtcttcttgtagacgactgtgatatagaggaagctgggggagataccattgggccacaattaggaattgatttagagggttttggagaaaacggaattaagtatgatcacccatacaaattaactgtacgaaactgcaggtttaaaaataatgggcgtggatccgttacagcccacacaagcggtgaagtaaatcttgagggaaactacagtgacaatgttatctcttatggattcagcactgatgtcagtgttaaggacaacaagattattaataagggaaaatccaagaaatatggaattgactcggtgggtgtttcaagcacggagtcaggaaatagagtgcaaatcagcggtaacactgtaagagggtttgaaataggcatttgtgtaagaggtaaagggattgatgtaacgaacaatatacttgaaaacatcgcggcttgtccgattgcaacacatgaagcagaagatgtttttatttcgaataatcatattgaaaacagcgattgtatacaagttcaagtgcgaaactcaaaagatgtgagagttacaaataataaagggggaaataccacatctgcttatgccattaaaatcatggattcgaaccgtgtaagctttgcaattaatgaatttgcaaatgtgcacgggggaatttattgtgaaaggtctcaatcagttcgtttaaagttgaatgacctattcttaagcggaagtggatacggcatcttttgggataaggattctgaagtgtatttcaacagaaatgaaattcataatccaagaaatgttgcaatcaaaggtacatccgagaaatacagctgtcagatcagtgagaatcagatttatttctgtaagtcattgattgctatccacctgacaggtggttcagaacacatgttaaacaataatgagatcatgtttaatcgttcaacagaccagggatatggagtgtatttggagaatacggacaaagtacggcttgtaagaaatgatgcgcggggaattggaggtaagctattatctcacccttattgcacagataaagcaaagaatacaacgttaattcataacacatatgatagtggaacgctgaagacagcagaaggagatgttgtagtctaaataaaattgtagttttaacaagattgggagatggatatatggccaatattttaagtaaagaacaagatgaagcaatccggtatttcaagaacaagctaaacatatcggaaaaactgtacatatccctaattaattttaatttgcttagagataaacacgaagactttggcaatagactatatgagctttataaaacagatccttatctgtatatcaaagcgctcaaagaaggttacgtggttgatcagccaattgaatttaatgaagcaattgtgcggttctatgatggtgaagaacttgctgtaattcataagaccactgggaaaagatataatgtaaatgtaaaaatgaaaaagcttcctgacggttttacgctgcagtcaatgaatatgtggtcatggagtgaggttgtttaaataaatttaaactgatattgctagcaattttagttataatgaagtcacatggtaatgtttggaggggtattgtgtcaaaatcatatgttctatggggcttcattgtactattattagcttgtttttcatttttatcagatgtaataactgtaacaggttataatttcatctattggtttcagaatcaaattcctgaatcggtagtgatcatagtattgttttttattattattggtttaatttattgggttaaatctatttataggcaaaacaacaaactaaaaagcaaagcaaaagaacttgaaaacaaagttttagaacttgaggcagaaagattgagcaaggctgataaaagtttgctagaagaatttttacaaacgtttaatgacaaattatataattttactgagatgttagttcagactcgacaattatcatttaaccaaatgcagaacttggaaaatgatgccgttctttttggatatcctcataaaaagtttgaaaacgaacgacttgagaccgctaaaagaatccttttggatagactgaactcttttcttgatttttattctacacatactataagcactactgctccaacaatcgttagatttaagccaaaaacagaaaaagacgaaaaggattatcaaacaaagctaaaagagttctatgagagttgggaaacatttatgaaagttgttggaaatgaaacacgtaagtaggatcatatcagccagttagtgctggctgatatataattttttatttttaagaataaaaataaaatagttattgaccattttgtttagatgatgtaagattaaattatcccatagagagaaaggaggaaagagatgaaaaaggaattaaagatactgaaagtatctgctgaagctttacatacctacaaaaacgatgtcaaaaggaattacgacattgatgaagaccaagcaaggagaaaattaaccaggaatgtgatgttggtaaaggaatttaaaccacaaggaattaaaagaggtcttttttctaaaacatattcatatggaaacttaaagatcataatccggcatggaacagtaataaggattgaaaatgtaaaaggtgatcctgaaccttgggactttccaaaaaagagatacatagaattaaacaagctacttggtataaaggattgtaagtttagtagcaagtctcattataggcattttaaggataaaaataaaatataaaaaagaaagaggtgcggaatattaaaaaggtaaaattatttacacacactgacctagacggagttggttgtgcaatagtatgtaaccacttattaaatgacgtggaagtagagttttgtgattatcataatatagatcaaaaagttcttgaattcataaataataacaggtttaaggaatatgatttaattctcgttacagatatatctgttaataaggatcttgctgaaaaaataaatgaaattcaatcaacgtctaaatgggtacttattgatcatcatgcgacagcgaagtggttaaatatttataaatgggcaaatgttaatgattactatattaaatcaccatgcgaagaaaacctaaagacatctgctacaagtatggtttatgaccatctcattaagtttcaaaataatgagtgtgaagaattgagtgaatttgtagaaaaagtaagaagatatgacacctgggagtggtcaacaaaatataatgacacccatgccaaaaaactgaatgatcttctttatattattgggagagaaaactttataaaaagattctcaacaaatccatccatttatttttcagatcatgaactacatattttggacattgagaaatttaaaattaaagaatacatatctaaaaaggaaaaacaactgagaactttgcaagtgcttgattacagtgcaggagtagtgtttgctgatacatatcaatctgaactagggaatgaacttgctcagaaaaatcctaatttagatttcattatcataattgatcctggttcattaaaggtcagttataggggagtcaaggagaaaattgatttaggaaaagacattgctgctaaatttggtggtggaggtcacccccgagcagccggtagtcaaattaatcaaagagtcatagattcagttcttaaattaatcttaaactaattattctgggaggaattatattgagcaaactttataatacatttgaatttatcggtaacctatttatttcaaacaataaagagaaattccatgaaattaaggaatatgacagcggatgggttaaggaaagattgagcttcgcagttcaagagtcaaaaacaaacagtgtttttgttgagattgaaggtggttactcaaaaagtaaacaaaataaagtgttttcatttagcaagggtacagaaaatgaaaaaggatcaagactcgaaattccatgggaagatcggttgaaagaagaaacagtaaacatggttgctgatttttctaagatcctaattaacttaaacgatgagtcaacaaaagccaaattaaatgaattgaaatttaaaattagagggttggaaatgaaaggctctcttactgaagaagaaaataaaactttatctactctcaagggagaatataaacaattaaacgtaaatggtgcagaattcattcatgaatatgatgctattcagtacttgtcccaaaacctcgaaaagcataaagacaataaatttaaaatcacaggcaatattgaatacaattcatggaatggacggaattttagaaagttcaaaatcaaaaccattgaaattgtaagtagtgatacaccatctcaactaagagccaccatggatgtatttttcacaagtgaatctttagatgaatcgtcatttgaggaagaaaaaaggtactttgttgatgcgtacgtacttagctatgataatcaggcaaaaaaagatcgattttttcctcagcaattagtcatcaatgcacaaaaattggactttgaaaatgaattacatatgaaacggttagatctcttgaaaaacttctttaaagttgaaaatgatgaagtttttcaccttcaatgggttgtgaatattttcaggggtgctgatgagattgagtttaccgaagaggaactcacggaaagtcaaaaggaaatgattgctttaggtttaaacacactggatgactttaaacctaaaggagggttattgggcgaaaatcgtgaagaaaatagacttttaaaacctattttaaaaaagtttaatgattctaatgattttacagaaggtgccgcaacatctacatatgaaattgaagatcttacatatattccacaacagattcaaaattctacaccacccgtagaaaaagaagaacctaaagtgactgaagaagaaaaagataatgcatttgatgagttatttgcttgatttgaaaagacctaactaacatttatttaaaaacaataaggagatgtttatccatatggcaagaaaatttggtaaaaagaataaaattaaagttaatcctctcgattataacactggaattattggtgaatcggggatcggtaaaacaactctagctaaagaagtttgcgaaaaattagtcggagaagacgggtatataatcttgaatattggtaaagaggatggtattgatgccatccccaatgcctcttatgaagatgttcctgattggacaacctttgatgaaattactaaagatattattaaaaacagaacaacagattatgctgatttaaaggttttagtatatgacacatttgatgagttgattaaaattacagaaccagaagttattagactacacaataaagcaaatcctgaaaaaagagtgaataccattaaagcagcattcggtggtttccaggcaggagaagacaaggtaattgagttaattcttgaaaagatgtggaaacttaaaaaggtcggtattagcatgtttattttaggtcatacgaagaaaagaacaatgacagacgtagttactggtttggaatatgacatgctgacaaccaatatgacacataaatacttcaatgcgattaaaaccaagctccacgtcttgggagtagcatctattaatcggtcaattgaaaagaaaacagtaaaacaaaaaattgggcctgacaaaacagtgggaacagttgttgatgaatcaagaatcatcacttttagagatgataactttaatattgattcaaagtcaagattctcagatatcacaccatcaattccattagatccgaatgaatttattaaagcaattgaacaagctatccatgtggcttttgataaacaaaaaaataacacaaataacattgaagaagaaagaaaagaacaagagcaaattaaagaaattcaaattcacaacgaagttaacaactcatcttttattgataaagaagagaatgagagattggcagaagagattaagacactattccctaatgcaactgacgaagctaagggggaaatgaagaaaattatggatcaatttaatatgaaagattttaaaggggtagacattgtaccaactacagcattcgaaaagatagtcgaagcattatctaactgaaggaaaagagggggagagtctcccccttatcaataggagagggtattcttggccagaagatgtgtatgtcaaatatgtaaagctaatggaactgtcgatacttttttcagggtttctgacgataaggggaaaaataaatactactgttctaaggatgaatatgaaaactatatcaaggataaggtgaaacgaaaaaacctcttaaattacatagcgaaagatgtcttgaattatagcgagggtcaagtcatttctccaatttttctaaaaaagatagccgaactaaaaagtttttatgattatgaagtgatacaaatttgctttgagaagaaccaacaaacaattcaatattggttaactaataaagagttttacaacgagtatggaatgattagctatatttttaagattgttgaaagtaacatcaatgatgtttataaggaatggctgcatgaacaaaatcagagaatgattgaaaaaaatcatcatcttgatattgcaattgtaaatcaaactaatatcgttgattccacatctttaaaacaaaacaattcaccaaaaaatataacagagtttctggatggggaggacgagtattgaacaacttagattcttatccaaaggaattagttgaaaacaggggacaaattgaaggaagctttatattttgtttatggaaaaaccctgatttgtatgaggattataaagaccacgtgagggcggatagagattttctaacagaagacgggaaattttattactctctaggtttagaactgagcaacatgaattataagagctttgatgatgcaagtgttttcagctacatagaaggtaaagaaacattaaaaaatggttttattcggcgaggtggaatgaaaaccattgatgaactcaagcacgtattaaacgatgaaaacgttgatacatactatgatgagctaattaaatttaacatgatacttaaacttcatgataagggatttaatgttacgaacgagcttgataaattcaaaaaaatgacgagtcagcaattgtacagttactttgaatttcaattagataatgtttttctaggtcgaggttcaggagttaaaattgaagatctggatttgaatgaagagtttgtcgaatcaattgaaaacggggaagaaatgggattaagctattcagctgcatgtccattattgaattatcacacgcttggacttcataaatctaatgttcaaatttttgctggatttagtgggacagggaaaacaagtttttgtgtttcttcttatatcatgtcaattttggatcagggtgaaaaggtaacaattatcgccaatgaaatgaataaaagggcttggcaacatatttttatggcaacaattttaagtcataaacttggttattatggtttaccaagaaagaaacaaaaaatgggcaacctgaagcatgagcaaaaggaaatgttacaaaaggcaattgaatattatgagaagcattacaaggggcgtatcaaatttgccaagatatatgattacagcattaatgatgtaaagagaataatgagaagaatggcaaaacaaggcttcggttatatgctttacgatacatttaaagctgaagatgctgcttcaactaatgtaacaggtgagctaattgaagcttcaaaacagttattacaagttgcggaaaaagaggatatttgtatcatcattacaatgcaattagccatttatatggagaatacaagatatctaacagcgtcttgtttatcaaatgccaaagcagttaaggagattgtttccgagttagttctaacaagacctttatgggaagatgaattcccaggaggaaaattcgatgttaaaccctatagattcaaaaaagactcgtcgggtaaatttactaacattaaagaagaaattcagttagacccaaataagaagtatagattattctttttgaataagacacggaatgacgaaggcgatacagtgttgctataccaatttgacggtgcatggaataaatggattgagctcggttattgtactcctaaacatcagagaactacagagcggacatgattaccaagggacggtgaaatcatggacgtatatgatcttaagaatcacattattgaaaagccagattacatagaacttattttagaaaagacggggttttacaacgttgatgaacgcggaaatgagtatagatgtgcaagaaaaaaaggaagaaatccgacatcagtaaaagtaaataaaaccactttaggtgcaacctgtttttcaaccaacttaaaaggtgacttgataacacttgttcaaaataaattgggtttatcttttcccaaaacaatcaaaaggatatctgaaatagttgattataaacgtgaagaagaatataaaccacctgagttaccattcggaggtttttataagaagataagaaaactaagtaatccaatggatttggatctagaaacgtattccgatgacattttagatcaatttgaatccgttccaaataagctgttttatgaggatggcatattacctataacccaatctttgttccaggttggttacgatagtgtttccggaagaataacggttccatggaaatctcttagtggtgaattgtgtggtgtaatggggcgccttaataagaaggaagttaatgatgaggaaacaaaatggttgcctattatttcatttcccaagtctaaaacgctatacgggtttgttgaaaattacgattcaattagagaaaagagcattgttttgatcggggaatcggaaaaacattcaatggccttagcaagtaagggattgaatgttggagtttctttaggcggtagctttttaagcgaaattcaagcaaatcacataaaatcaatgtttccgaaaaagtcattagtcatgatggatgaaggattaggtgaagaacatagcgtagaaattgccaacagcctaaagtttgaaaatttctttgaaaatgaagttgggtacatatttgatcgtgaaaacaagtatctgcctaagggatcaaaaatggcaccagcagaccttgataaaaacactctacaccgtctaattagagactgtacagtttggatatgaaaaggagatgattgattgaaagaaaaattaaatgaattaagacaacaagggaaaaacatttattccttttcaaagctcggaacctttaataactgtgaatatgaatactacaatacatacgttttgaaaaagaaaggcatagataatatttacacccttatgggttctgaattacataacgggattgaacagatttataaaaatgaattaaacattggagaatttaaaaagggatttgaaaatagattaattgaattagagctgaatggagtcaactttccgagtgactcaatcggggacagttggaaagcagacattggtcatttcctaaacaattttaataaaattgacagcaaaatggttttagagaagctgcttgtatttgaaatatcagatggaatatatcttcaaggatatgtagatgcaatcctgcccagtgaaaaaggaaaaccgtacgttagtatttatgactggaagacatcaagtaagtttgccggcaagaaattaaatgaagcaggaagacagttattgatgtacaagcttgcgttggagcaaacaactgacttaaaagtagataaaatcctatggttcatggtgaaatacgtttatgtatgtacccaaggaaaaaccaaagtgaaaaagaaaatgtgtaacaggggtaagtgggtaaaggaaatacgaatgcagctagaaaaagagatgcgcactctggaatatgatgatttcgaaattgacctgttgttagataacgcagtaaaagaaaatagcatagactgcttacctgaagagattaaaaataagtattggcttgaagattgtttagttgaatacgaagttactgaagagaaaattaatgaactgaaagaatatattactgatactgttaaaaagattgaaaataaagaccgcgaagatgaaacccaatgggaaccagtgaaaatagataaatacaattccttttattgtagtgtcttatgtggtcaccgaaaaacatgcaagttttataaggattttttaaataaatcatcaaataaatttaagaaaaaggataagactgatttgtttgataacctattttcttagggggtaatgatgaggaagatattctatgactttgaagtttttaaacataactggatggttgtgctgatcgattacgatactaaaaagggtaaggttattgtagatgatgttgatgaactgaaacgattctataagatgtttaaagatgatatttggattggttacaactctagaatgtatgaccaatacattctaaagggaattttattgggaatgaaaccatatttcattagttcgagaatcattaatgataatgtaaagggatttaatgttgttggaaaaggttataaaatcccattgaataactttgacataacaaccggtttccatagcttaaagcagctagaaggctttatgggttcaaggattaaagagtcatcagtaccatttgatatctcaagagcattaacagaaaaagaaattaaggaagtagttgagtactgtattcacgatgtgaaacaaacaattgaagtgtttgataataaaaaagaggaattcgaaagccaattggccctaattgaagcctttgatttggaaatgtctatgtttacaaagacaaaagcccaattatctgcatttatcttgggggctgaaaaacaaggaaacaggggagatgagtttgaacttagatttcctaatacattaaaaattaaaaaatataaacacattgttgattggtatagaaatcctgaaaatctagattataaaaaaaatttaaaggtggatgttgcaggtgtacctcatatttttgcctggggaggtttacatggcgcaataccaaagtataaagatgaggggataattttatgttgtgatgttgcatctctatacccttcaatcatgattgaatatgattacataagtcgaaacgtgaagaaccctttgaaatatactgagatcagagatacacggttagaacttaaacgcaaaaaagatcctaagcaggctccctacaagattgttttaaactcaacgtatggagcaatgaaagatcagtataatccactatacgacccgttaatggcaaataacgtatgtttagccgggcagctgctgttattagatttgatcgagaaaattgaaccgtattgtaaactgattcagtcaaatactgatgggttgtttatgaaagttgaaaaggaatctgatattgatttaattaaggaagtcgcaaaggagtgggaaaccagaacacgactagatttagagtgggatgtttatgagaagatttatcagaaggatgtaaacaactatataatcattgataaagaccaaaagtataaatctaaaggtgcttatgttaaaaaactaaacaacctggattatgacttaccaattgtaaataaagccatgattgagtattttacaaaagacattccagttgaaaaaaccataaatgaatgtgatcagttaagagaatttcaaaagatatctaaggtttcaaacaaatatatgtacgctctttatggagaagaaaggctacctgaaaaagttttaagagtttttgcttctaatgatgaagatgctaaaggtgttttcaaggttaaaacagaagaacgaattgaaaaaatcggaaatactccaccgcgctgctttataaataatgataacgttattgatttaaaagttcctgattatcttgataaggaatattacatagagatagccaaaaaacgaataaatgattatttaggaatatcgaatagaaagaaaacaaagaaggagaagtgatatgcatcgccattgagagtaaaaataaaattaaaacacacattttcaagtctgtttatggtatgatgattttaattcccttaaccactttttcttacataagttatgagcaacatttacataaaaccgagggaaatgaagactcaataaaagaatcattttataagaagcctagacagattaggatcccatcaagtgagaatattgtcttgcggttatttaaaaaagctcaaacgaacaaagaacaacaattaaaaaagcatacagagaagattatctcagcaaaactcattaaacctaagcaaagtaagaaaaggcacatgagaggaggtgaaaaggcaaagcatagagtttttaagagtaaaaataaaatatacaaacaaagaaaagaaaacaaggcaccggccgcaaagaaatctatccaggttaagctgagtgcttatattgcacactgccaagaaggatgcacaggaacaactagaacaggtgttgatgttactcaatcaatctattacaaagggtatcgtgttattgcaaccgatccaagtgtcattcccttgaattcaattgttgaaataagcattggcggggaaacgttcaaagcaattgcaattgatactggtggcgcaatcgttggaaataaagtggacttgctcgtagcaaccgagcgtgacgcaattaattttggcaagcaaaatgggacaatctcaattattagttaggagaaggaggttaattgtatgtttaaaaagggagagaaggtgattgctggtttcacagaagaaattggtgttgttgcacaagttgataaaggacatgagcaattagaagttgagtatccagatggctcatatagagtaattggcttcagcaatgtgagaagggtggaagataaatgacgatgataattttagaaggaactgactgctgctacaaatcaacagtggcagataagcttagcaaagaacttggatatccggtcataaagggatccagctttgaattagctaagagcggtaatgagaagctgtttgaacacttcaacaaactggccgatgaggacaatgtaattattgatcgatacatatattcaaatttggtttatgcgagaaagttcaaggattactcaatcttaacggaagatcagcaaagggagattgaggagaagattagatataaagcaaaagtggtttatttacatgctgatccgaaagttattaagcagcgtttacttgaacgtggtgatgaatacataaatgatcgagacattgagccggtcttagagttataccgagaagtaatgagcgatgtaggattacatacatattcgtgggatacagaacaatggaatagtgatgagatcgtagaaggtttgattcaattatttgagtaaaaaattgagagaaggagtgaattaacactcctcagtaactaacgtgcttctactgtaattttaaaaattacataattgtcgttaatgtcatacgcgtaaaccaatgctgtgcccaatgttgaatgagaggatacaacaccactggaactaatgctaataaggttgcttccagaaacaatttcccaccgggtgtaaccttttaatagagatacgttagaattcctaagcatgtggtaatcaactgtaccgagcggatcgcctagctgcttaacttggtcaactgatttgacaggtgttagggctgaagcttgtgatgtgaatgcagggagagctagtgttgtaagcgatagagcagaaacaatcaagcctttgtaaaactttttcataagaattacctcctaggttttgattgtgattacaacttcagtctagcatgttaaatatttgaaatgtgtgaagtgtttgtgaaactgtttaaaagatcaattttatttagagtaaaaataaagtaaatggaggttatttattggggtgtctttgtgaaaataaatatttgatttggaaaggggatgattttttgcaggatgacaatagagtacaaacaatctgggtatgttcaaaatgcaaagaatcatttgtatatataaaatcaattggctgccataagcctctaccttgctttaaaatggaggtgaagggtgctgattaacttggatataacatataaaacaactattgataatccatcaaaacgggttcttgaaatatcagatgcatttggagttggaataaatgaatcacataaacacgttattatagagaacttaacaattccagagtttcaaatcatgtatttaactggaatgagtggtagcggaaaaactagtatgcttaattattttaaagaggagtattcttttactgaaccggatattgaatttgattctgaaaagcctattattgatactataggtaaggatactgaaaatgctcttttccttttgaatttggtgggcctaggtgaagcatttctatatataaaaccttacaaagtcctttcagacggacagaaatatagatataaaattgctaaaattattgaaagcggacaaaaggtttggtgtattgatgagttctgtagttttttagacagaacaaccgcaaagatcgttgcttttaacacacaaaaaattgcaagaaagcttggggttaaactaattgttgcaacagctcatgacgatcttaaaaattacattcaagctgattatgtgtttgactttggaatgggggaaggattagaaataacaagaaatacaaaagaggttataaacccttttgttgatgaacttgagataaccccaggcaccattgaagattataaaaagcttgggaaatatcattacaaaaataaagatgctcgctttactaaatacatatttaagatgatgtataaaaggatacttgttggagttgcagtttattcaatgccccgacagcaattggttggaagaaacgttttcttcaataaaaaatatgtaaacgaacgtgggattccaaaactaagcgaagttaacaaagactttttgatggggtcaagattcatcatacaccctatgttcaggggcgtagggttaggttctgaacttgtaaggaaaactgcacctcaggttgacagaccttatattgagattgtatcaactatgagtaagtacaataagtttttagaacaagcaggggctcattatgtatgtgacaatctaaatgaagataaaatcaaaaagcaagaaaagattattaaactttttgaaaaatacaaccttaattatgaacttatttcatctattgactactgtcagaaggttttagatactgtaccagttgaagaattgaaaaatgcaatatatggggttctaagacctaatttctttaacaatagggcaaggtttaagaaatatgggattgattttcaaaccaagaaagagtttatggagcctgattttcctttaactccagaaattttaagcttggcaaaatggccaacaactacatattacatatgggacaatacaaaaattgagagctctcagaagtgagactctcaataaaatttgtcttttaaagagtaaaaataaaatataagaggtggagtctgcggtgaactatccagaaagcttaaaagagaaagccgaaaagattaaagacgaagtaagaagcggaaaattagaagaggagaaaataaaagcgattgctaagtctgcagttgaacttttaagatccgaagagaagagccatacacattatgcagaagttgtcggtgcaattgctgcaaacctagaagatttctttaagtcttatctaaaagaggattaatataacaggattaaaagaaaggataaagggatgtttattgaaaaggtactatgttagatgtaaagatcacaaagacgaaaatacgtctttaataattgaggcgttatcacctgaacaggcaaaagaacaagcatatgaagtacataaagtaagagatatttataatgtgagtctgggagaaggaaagtcaaggaattatcttgaacgaaaatatgctccatacataaaaaataacaacagcaaggcggtaattatcttttcataagggaggacgtccgtgcgcatatctgatccaataaaagaaacacttgtgcaaaatatagatcaacttagtagcagagttgatgagttgttcatttatcttgaaaatgagttgccgtcaacatctgaaagacaatggaaaactatagacaataaattcggtgagatttttactaaatctaaggaattacaaaattacataagttgtttataaaggtgagcaatatccccttgatataaggacatctgtgttacttaatattcaaaatcatcagtatttcttaacaattatttatatgattggtagcatttattaaagaaagaaggtgatttatgagattgtctgtttgataagtattggcgccagatgagaattatatttttacaaaggggatattttaatgaacagttatttttatcgaacgatcttagcactagttgccgtatttgtgctggccttttcaacatttcctccgaacagtgatgcaaagagcacaatctcaacagataatgtcgacaaggataaagtaaaatcagaggcagaatttattgcagatcacactattgatgtgagtaaaaagactaaggaaaaacttctttccaaggcagaaaaagcaattgaagatggagacattaagtatcataaatcaaacgaaaaggtatttgataatgcatcagttagagctattaagtatgatgatggcacagtaacttattcggtttcttatttatacgtggacactgaaaaagtagacagagttagctcatttaatgtttcgtttgatagcgatatgaatattgaagagtactatgaagttgacatgaagaaaatcagcagcactcaaaacgaaatgaattattgggttaatggcgttaaggatgaggacaagtctggggtctttgaaacaaaacaaacttcagaggacaaaggaagtacatctaacatgatgagtgctcagaagagttggactggatgcgtatcagattgcttaggtgataagaatattagccaatgggcaattaccggtttagctattttatgtggagtttcatgcacagctggtgttccagcaacagcagggactgcttgctatgcttgtgtaaattctgctggtattattggtgtaaatgcattctttgattgtatggagaagtgtaaatgatcaatatcttaagtaaaatactatttgttttgtctggttgcgctttgttgatctttgggataattttaaagaatggatcaatggcttttggattgtttgccttattcttcatagcagcaataattgttcgtgtatttcataaacgaactcaaaaccattagcagcagccttattgtactgtaggggaggaaactctcctactttttaaaaaatattaagagtaaaaataaaatagttattgattgttcgggagaaagcgagtatattagaaatataggaagcgaggtgatgcattggagtgtgttaaatgcagggatcacattggcgacatcgtttattacataagaataactgacaacaaagaatgcaaggaattcccggtacataaagaatgcggagaagcaatcaagaaagaatgcattgagaattgcaaagacatgaaattagaaaagacattggattacttgcagttattttaagagtaaaaataaaatattccttttattgagaatggagagatgctaaatggataaattgaaagtttgtttacataaaaaaggtgctcatacgttagaaagaactgttaatggggactggatattagattcaaaaccaattactcaggatcaagcaattaaagaactagttgaagcggttagtgatttaggatattggtgccaagtagcaaaagatgttttagataaagaagattttaatgcagttcaagaagcgtatgaatacaaagaggaggtataaatggcgaaatcaagattaaacggttattgggataacaagttggatgccaacgaaacagtttatgttgagagggtttataagaaaggatatgtaactggatttaagtatttacaagttggtgagaaagaagttacttcaccatttagggctacatatgaagagttagaggggaattataatcaacggaaatactaataatttcccgggcaagcgcagtatacgacaaatcaaaacaaataatgaggtgagatcaattatgaacaaagaacaatgggtagttgaggtctatgcaggaaaccaatacgttggaaaaatgactttgccgaattcaaaagaagtggagacttttgatcacagggaacaagcaattactgaggcacagaaactgaaggcaaaaggcaccataggaatctggtgtaaagtagtaccacataaggaggaacgtaatgcatctagctattaaacttgggaattttaagtaatgtctaaataaaattcaatttttatcgagaggagcaactgaaatgcaggataaattaatgtcagcagttcactttattgaggtcaatcgggatgaaatgggtgacaagaaatcactaaacatgcttttaaaagccgtaaagaaaatcatcaatgagggagaaaaatgaggtttcacatacttgaagagaaacaaatgagaggcatcggttttacagatcacgtgaaatcaaagtggtacttcataaaatcaattcaccctaatattacttttaatttaacaatacataaaaacagtctaaacggtgaaattgatgttctaaatgaaagaagtttgcaaccatatgattatcagtactacatgaatgcttatacaagagaaaaacttgaatttccacatatcatacatgataaagtccaagaaattatgtcttacttaattgaagagggaattatctcagattacacattaggaagttacatataaggaggtggataagtgggacggcataaagcaacatttgaagggaaggtaattaagaaaagttgggggctggatattctttgcggtattactgaaaaggaaaaaactgagttcaaagccttcttcgaaggaattattgatttagacccaattgaagtcggagggaaagtgtatatcccagggtttaacgaatacgtagtcgtaacagacaggcagcgcaacataaaaaatgaatggacatatcagactgataagatcattaagacaattgaagacaaagaaagtcttgaaagagcaattaaagagcaagcggaatttgaagaggaatggcagaaacatgtcagacaagagaatcatcaagttgaagaacaaaatgaagtgagtaaaacatcctggtggaagaggttaattaaaaaagactaaaggagagattttttgaataaggatacaaaagatatttggaacggtttctttatcggatcaggttctctgattgtagttgggttacttatttttgttgaagcattgactatgtcactagttgtctattatggattgaatcatgtgttaaatccattgcttattgatacatacaatattcaaaatgttcatgtcactttacctcatgcatttgttattggtgttttactcaacgtatttgtcaaaggtgtaaaacagtcagatcaagaaagaaacgagaatatcttcaagaaagcaggtaagtctttactgtattcagcttttgcgttgattgttctgtatgtgagcacactatttatttaacaagaagaaattcggaatattcaaagcgaaagaattcttttcttcaatcacatttaaaatgaaattaaatacatggaaggtgatgttatggaattaacaaagaagattacaacaactagaggcacgtatgaaattaaattagttgctgaagaaggaaaggggctaggatgggacattctagaatgggaggttaaggatcttgttacaaaatgcacactggctgcaggcaatggaatgcctttatcacatgttccttatcccttaaaacgattgacgttggttgataaagttaagcgaattgttagtcatgtcgaatcagatgaaacaacaaaaaagagaaaagcaaatgacattaaggaattcaatgaatggagcggagttctgaacgcgtaatcggttaaaagttttattttaaaccgattttgcaaaaggagagtcagatatgatcttaaaagaaattgctttatatgaagaaacactaaataaacatttgccaaatgaaacaaaaatggttcttcattacagaaatgtagaggcaactgaaaacgaagataaaatcacattaaggtttgctattgattcattggtgtataaatggcttgaactaggcggggtattaaagggttcttataaaatgaaaatgacaagcttagaggatgaaacaaaggaggttaacgtgaaaatcgaaaaaatccaaacgaactcagacagaggtttggcggtggaaatagaatttaatgtactcagtccatttcggagcattgagggcgtagctggcattcattcgttctccataaaaggatgattttaaggagttgattagacattagtataagtcaaaggcagtctcaacgtattcgagaagctctgataaattcaaacacaactgctgaggaaattggaatggataaggcattatcagaagttctcaatctactcaagagaagaattttggagctggaaactttgtattatccagagtgggaatatgaaaatgcaaaagtgaagcttgaagagcttagaaaaatggtgaatagaattaatgcacttcgaggaaccgggaaggatgaacaaaatgaatttgaaaatgcaggaagcggttttacatctcaacaaatatgacagcagttcaaaaagtgctcaagatgcacagaagttgttgaatgctttaaaggatacatacgatgtagtcggttgccggtttagacattataaaggcggtctttataaggttattggagaggtcattcacactgaaacagaagaaaagctggttacatatgaagaccaatatggtgttctttgggcaagacctaaagaaatgttctttggaaaagtggttgttgagggtaaagagattaagagattcacaaaaataaactaaaaggatgatgaaaatgaataaaaaatacggactttattgcatgggaacacttgttaatacttatgatgatgctatcgaggctcataatgatgctgtatatgctcaagaagaaagcggagtactgcatgaagtaagagaaattcaataaaaataagaggaggatattatatgattcaagggttttataaagatcagaaacttcaccttctagaagatcctatgcagcagtacaccgtcatgaaagttgaagaaaatgcagtatgtgtttaccggtggatcaatgattatagacacaagattgaaagattcacagatgttgaagaggctaaaaaactccttggagaagggtggccgaaacaataacaaaggaagacacaatgaaatttatacagaaacaattggaggacgaatagatgtcgcaaagtaactataggccatcagttcctagatgggttggctatatactagagctagacaagaaaagaagacaaaatcagtacagaggctcactaacgtcaggtcaagagaagaaggactgggacgattggaagcgtagatattcaagaaaattaaagtacgcaagattaaacggatggacgatcgaagaggagtgacaattcctaaggaggacgaatagatacggcttgaatctagataaaatcacagtttcataggaaggggaagtaaaatgagtgcagcaagaaagtggagagatctaagaagcaaattaattggttataaggcattcggtaaatttagcgatgttgttattgaccatattctcaatgatatgtatgagttggacttaagacacgaaaaagataaaatcaaaaaatagagaaaagggagttgtggaatgggagctgctaaacagttatacgttaagcgcagtcactttgtaaccttggatgaagcaaaagaaaatacgcaagtacatatgaagaatggtggttcttacactgctttaaaaggagagctgattgcgaccaatttagaaggggatcaaatggttatcacgcaagagcagaaggataactacattccagtaccgatgacagagctatcagactatgaagctcaaatggccaaaggctatgctgagatggctgagatcaacttagaaatggttgaagctttccatcatgctgaaaatgaagcagaaacaactacgaatagcttagttaacggggaatataaagaatattgattattacatatgaaagcaagacaggtaacgttaaaaggtttgctcaagcattacaaagggagttaaactttgacatcattgaaattacagatgacttaattgttgaagaagaattcatacatattacatatacgataggctttggggaagtacctgaaaggactttgcattttattattaagaataaaaataaaataaaaggagttgttgtgagtggtaacaaggtttggggtgataactatggtttagctggggacaagctttcagcaatgttccacgtaccattgttattaaagtttgaactaagtggaacaaaacaagacttgcagaagattaatcgggaggtacagcttattgacaaacacaattccaaagtggatcaagctcaataatgagatcatgattcagaaagacggtaagtttcaatttgagaaggataaggaggccgtacacagttactttgttgattacattaatcaaaatacagtgtttttccatgacttaaaagagaaactggattatctgattaaaaatgattattacgaagaagaattcttaagcaaatacacatttgaacagattaaatcgatttttaaaattgcttacagttacaaattcagattcccatctttcatgagtgcgtttaaattctataatgactatgctttgaagacaaacgacaaaacaaagatcctggagagatacgaggatcgagtctctattgtagctttgtattgtgcagatggtgattatgacaaggctattgaggaagtacaagccatgatgaaacaagagtatcagccggcaacgcctactttccttaatgcaggacgtaagcgaagaggtgaaatggtaagctgtttcttgcttgaagtgggagacagtttgaatgatatttcacgggcgatcgatatttccatgcagctgtctaagctaggtggaggagtagcgcttaatctaaacaaattaagagccaaaggtgaagcgattaaagatgtagagaatgcgactaaaggtgtcgtaggtgttatgaaattattggacactgcttttagatacgcagaccaaatgggacaaaggcaagggtctggagcagcttatctaagtgtattccacccagacattacagacttcctggataccaaaaaaatctcagcagatgaagatgtccgagttaaaacactgtctattggtgtagttcttcctgataaatttattgaattggctagagaagataaggacttttacatgttctatcctcattcagtttacaaagaatacggacaatatctcgatgagatggatatcaatgaaatgtatgatgagcttgttgaaaaccctaaagttaggaaagcaaaggggaatgctcgaaagctgttagagcaattggccattcttaggagcgaatcgggctatccgtatatcatgtttgctgacaacgtaaataaagtgcatccaaatgaacatatttcaaaagtgaagttttccaacctctgcagcgaggtactccaatcatctgaagtatcaatttatacagattacgatcaggaagatgaaattggattagatatctcatgtaatcttggatccatgaacattgtaaatgtaatgagtaaccaatcaattgcttcaacggtcagaatagcaattgactcactgacaactgtcacaaggaaaacaaacattgtaaatgccccagctgttgcgagagcaaattcactaatgcgatcaattggtctagggcagatgaacctgcacggttttctagctcaaaataaaatcgcttatgaaagtgaagaagctaaggactttgcaaatacatactttatgatggttaacttctactccctgcagcgttcaatggaaattgcacgagaaacaggggagacatactacaaatttgatggatcagcttacaaatcaggtgagtatttcgaaaagtacgtaacaaatgattatatccctaaatatgagaaggttaagaacctatttggagatcaacatattcctaatattgaagattggatgaagcttaaagaggacgtaataaaatatggcttgtatcactcgtataggcaagctgttgcacctactggaagcatctcatatgttcaatcatctacggccggtgtaatgcctattatggagagaattgaggaacgtacatacggaaacagtaagacatattatccaatgccaggtttatcggctcaaaattggttcttctataaggaagcttatgatatggacatgtttaaggtagttgatcttattgcaactatacagcagcacgtcgatcaagggatttcatttacacttttcttaaaggatacgatgacgacgcgcgatctaaaccggattgacttatacgcgcatcacaaaggaattaaaacgctgtattatgctcgaacgaaggatacaacacaagagggttgccttagttgtgtagtgtaggaggtcagattctataaaaaacaaatatgaaatcagaggcgacactacagccatatttattgagagtgaaaaatttggattgatagaaacaataattgctacagaagatttaccaaaagcccaagaaattgaaggttggtggtgcgttagttgggattcttgcattaaaaacttttatgtgagaggaaacaaaaaagtgaaagatggtgtttggaaaaaggttagacttcacagatggttgatgggagtgactgatccaaaaacgcaagttgaccatatgttacgagatactttagataattgtcgatggtctttacgtattgtatcagcatctgaaaatagccaaaacagaagagttccttcaaacaacactagtggacataggggtgtctattggaatagcaataggcaaatgtgggaagcgaggatagacgcaaatcgaaaaacgatatacttaggttatttcagcaataaatccgatgctgccagagtaagaaaagaagcagaggagaagtattggattatttaggaggaacaaaattgacaaattacacagcagcaaactggtcaaagcatgaagatgatttcacccaaatgttttacaaccaaaacgtaaagcagttttggcttccggaagagatcgcattaaacggcgatcttctcacttggaagtatcttggaacaaaggaacaagacacttatatgaaagttttagctggacttacattattggacacagagcaggggaacacgggtatgccgattgtggctgagcacgtcgaaggccatcagcgaaaagcggttcttaatttcatggcgatgatggaaaacgcggtgcacgcaaaatcttacagcaacatctttcttacattagctccaacagagaagatcaacgaagtgtttgaatgggttaaaaacaataagtttcttcaaaagaaagcaagaacaattgtttcaatttatgaagcagttcagaaaaacgatgatatttccttattcaaagcgatggttgcgtctgtgtttctggagagtttccttttctattcagggttttattatccactttacttttatggacaagggaagctcatgcagagcggggaaattgtaaatttaattatccgtgacgaggcgatacacggcgtttatgtcggattgttagctcaagagatatacaagaaacaaactcttcagaagcaaaaagaactgtttacatgggctttaagtttgctccaagagctttatgaaaatgaattagagtatacagaagatgtttatgatcaggttggtttagctccagatgtaaagaaattcatcagatacaatgcgaataaagctttaaacaatctgggattcgatcatctgttcgaggaagaagacgttaatccaattgttattaatggattgagcacaaagactaaatcccatgacttcttttcaatgaagggcgttggctataaaaaagcaacagtagaatcattaagggacacggattttatatttgattaaacttaaaaaagacagtcttgtcggtaaagtttatgtgaataacgcaaaccaaaagtacaaagtggttcaagtttttagagaaatgaacagatataaatatagaattcgatttcttaaaactgggtatggaagagttgttgaaaaagttgaaatgaaacgcgggaagataaaagataagtttgagaagtctgtattcggagtagggtacatgggcaatgtgaaaatgactgatcataaaaaggagtacagtgtttggagcggaatgcttgagcgttgctatcatccaaggggaagtggttatgaaagatacggtgccaaaggagtgactgtggaaagaaggtggcattgcttcgagaattttttagaggatctccctttgattaaagggtatgatgagatactgttttctcaaggaaagattcatttggataaagataaaattcaaataaatgtgccaataaataaaaggaaatactcacttgtaacatgttgcttcttaactaagaaagaaaacaacaattatagagacttagaaaatattaaaaaagaaatattcgcattatctcctgaaggagttttgattgaagctaaaggaattagggagtttgcaagagaccatggattaattaaacaaggtattatgcggtgtttatctggaagggctaaaacacataaaggatggaaattcaaatataaaagagaggcgatttaaatgagattaattaaattagagcagccaaattgcaatccctgcaaaatggtgtccaattacttaaatgatgcaggcgtcgaatatgagacagttgatgttacacagaagccagaagtggcagcgcaatatgaggtaatgggcgtaccggtaaccattcttctgagtgttcaaggagaagaagtaaaacgaagtatcggttttatacctggtgagttagacaccttaataaatgatttaaggggtcaataatgggattattgatattggctgggattgttcttgttgcaacaacaatagttgttttaatagatacatacggggaattgattttatctgtaatctgtggattcgttgctgcagttgttgtactaattgttgctggacttattgcagtgtttttcccctttgataaccacgcagtattagaagaaaaggtaagtgtttattcaattaaagacaacattaatgtcagtggaaaatttgtactgggttcagggatcatcgacgatacacaatatttgtatttcgtaatagaaaaagaagggtttaagtcagtacataaagttaaagcagaaacttctagagtaaaagagggaaactataaaactccatatgtgaaaaagtatcgttatgaatatacgaataaatttgtaagattcatgtttggggaatctccgccttttaaggatagctcatacgatttctttttaccggagcatacggttacccaggaatataaagttgaccttgaatagtcaataaacgggtaagtttaaacaaactaaaattaaaggagctaacacataatgcaaattaaaatcaaatatttagatgatacacaaacaagaatcagcaaaattgaacagggcgattggattgatctgcgggcagctgaagatgtagtaatcaaaaaggacgaatttaaacttatcccattaggagtggtaatggagctaccagaagggcatgaggctcatatcgtacctcggggaagtacatttaaaaactttggtatcattgagacaaactcaatgggtgttattgatgagtcctacaagggagacaatgatttctggttcttccctgcatatgcattacgggatacagaaattaaaaaaggggatcgtatttgtcagttcagaattatgaagaaaatgtctgcagttgaattgattgaggtagatcatctaggcaacgatgatcgcggtgggcacggatcgactggaactaagtaatacaagccctggcttagatcatgatgtttgtccagtggagggtcttagccagggtacaacttaaaatactcaaaaaattcaacaattatacctacaaaggagatgctggatgaaaaaaagattacgtaaaaaggcgtggatgatagggaatacaaaacatggcgaattcatgtttaatgtaattgataaggtaaatgcagatggatatgtgtattatccaaaaggacgctatcatgtagacagaaaagggaacatgtacaagtttaaaatttagaaaaaagcgaaattgtgatgactgaagtttataaagaacttagggataccaaagggtttattttttcacatttttcacatttttcacattaatgtagggatgtcgattgaacgaacatctctataaaagaagacttttatagaaaagtgaggtgagattcagtgaacaattatgtagataaaattaaagaacatcttcataaaattgctgagcttgaaaaaggattggcattattcagtgaagatgaagaagaatacataagcttattagctaagattcaggagcagttttattttatatccgacgaagcaatggaaggatttaaagaattaactatacatataagaaatacaggacagaaaagaatacaacggggaattgatcagctgcctcacacaatcaaagaaagtgtaagcgaagaaattaaagacataaagagatccggcgagctgtttgattgaacatagttatttataagataaaaataaaataaggagatgtattagaattacatactttacgttattacttgcagcatacttatttgcactaaacattaatgaaattagattaattactcgaggagaacagaacgtatacgctaaagttacgcatatgctttctaattcaccgtataaagaactgaagaaaaataagaacttagtatatgtcattacattgttcaaggggatttcattcatcatccccttggctactattggattgattacgcacggtaacttgttaatgttagcttggacagcttttgctttaatatataccggtttaacaatgtttaaaattcttgatgttttggaaggtgactcaaacaatcatcaaaacaagttcgtgtacatgctgtttgtttgcggtaatattgtcttcgtgattaactttattattggtcgtttcgtttaagcgtctaattcatgttcatgatacgcttcaagccatttaagccctggcctagaaggatgtcttggtgaattcttaactgtgagaagcctgttgtaatgggttttgataacaaatgcctcgtctttatttattccttttaggagctgtttaacatcgttgcattgcttattaaaacttcgtttatcgaatcgctttggacaatcaccccaagcaaagattacctttttagattctttagctaaattggctataatttgatgattagtcttaacggtagcttcatacaggctactgttctctttttgaagcttatgaattattgaggatagttccgctgaatttgtttcgtaaaaaggatagagattgacaatatgaatggatccaacttcatttaatgagtggctaaaattacataacttagttatagtgaggtcggatacttctttgtcagcaatacttggatttaacataataaacacatgtgaagagtctaaattattattaagctttattgataaacaatatcttgcttcaattgagtctgttaatctttcagttttacattccagtacttctttaaccaccgctggcttgtatttgtaaacagacaaaaagatcacctcattccattatgtgggcaaggatattttaccaaacaatggaattgaaaggaaggaaattatgagtcaatttgatatgcagtacaacacaatcataaatgacataattaataatggagtatctgacgaagaattcgatgtcagagccaactgggatacagatggaaccccagctaatgcactcagtgtaatcagcaggaaaatgcgatttgacaatactgaagtaccaattttaacgactaaaaaagttgcctggaaaacagcaatcaaagaattgctttggatatggcagcttaaatcaaatgatgtcaacgaattaaacaagatgggtgtgcacatctgggatcaatggaaacaagaagatggtacaatcggcaaagcatatggatatcagcttagtaaaaagaacagagtgctaaactgtgaaaaagttgatcaggttgattatcttcttcatcagttgaaaaataatccatcatcacgcagacatattacaatgctttggaatcctgatgatttagactcaatggctttaccaccttgtgtatatgagacacagtggtatataaaacaaggaaagcttaccttagaggtaagagctcgtagcaatgacatggctttagggaatccgtttaatgtgttccagtacaatgttttgcagcgtatgattgctcaagttactggctatgagctaggtgaatatgtcttcaatattggagactgtcacgtatacactcgtcatatagacaatttgaaaattcaaatggaaagagagcaatacgaagcacctgagctatggattaatccggatgtaaaagacttttatgatttcacaattgacgatttcaaactgattaattataagcatggagacaagctttactttgaggtagcagtataatgctatctcttattgcttgctgcgataaatcaatggccattgggtatgagaataatttgctttaccatattcctgaagacatgaaacgttttaaagaactcactacaggaaagttgtgtattcagggaaggcttacatatgaaacgatcgtaaacattacaggaaagccacttcaaaaccgaaagaatatcatactgaccaaaaataaggatttcaagcctgatcactcttcattcgtttaccattcggttgacgatgttttaaagcttatacgtggtcaattggatacaaatgaagaagtaatggttattggaggaggcgttatttacgaggcattcttaccacatgctgataaggtttatttgacgattgttgattcagttgctgagaaggcagattcatattttccaaggttaaatgacgattggagagtaattgaaaaggatcatagaaaagcagaaaacaataccacatataattattcatttgtgacttactcaaaataaattgagaataaaaataaaatagttatagacttttgagaagctgaatgataagataaagacaagttaaaagcttgtcttttttttacatacttttagagtgaaaataaaataataaataggagtggcgatatgaaaactgcaacagattatcttgtttccatttccaaacctcttgttgcaattgaggagactaaacaacgacttcaaaatgaaattgataacctttataaagagctaggcaaagttgataaagagctcaatgaattttatcacaagctagaagaggacaaatttaatgcatcagagggatatcatctttcgttaaaagagcaaaagatattgagaaagcgaagaagcttaaaacaagagcttcaattattgaacacacttttcgggagtttaaacaaaaacggatggactcttgaatcactaaaaattgcagagtataggattagcaaaaagaaaaacaagcacttacagtatgaatcggtttaaagacataatccacattcaccttgtgaatacatattgaatccttataaggaggtgattaattgcaacaaaaagagcgagaattgttgtcaaagaaagaacagcttgaaattgatgttttagaaaaggaagcagctttactcaggctagaagtggaacaagaaaacttcaatctccacaaaattggggagatcggagtacttaaagattttcttttatacataaagaaatacagagcaatgtttactgtgcagcaagcaaaagaatttagaaatatgaatagtcgaatgagtgaaatcatcaaagtccatcatggacaagtattggttgatgaagaagctttagagagattcattgatgatattgaggataaaattaatttaattgagattggaggagggggaaatagcggtgtggatgatatatggtaacgcgcccggcggctggacgccgagaattagcgtccaagaagggtgaaaataggttttctgaatgcgaaaacaaatgccgctgtaagagcaatagctactttatcttcggttgatattttcatgaatcgaacctcctttcggtaacttaggtatattgtaccacataaatacgaatgtgtgttcgtttttttaaaaaatttcgggagggattgcggaatggctgaaacgaaagagtatgtacggattaagaaggcgccctgtagatcgatatggtatgcagataagattgggagcatttttccttcgttagggacttgggagaacgcgtataaggtcgatagtccggacagggcgttgtatattcgaaaagaagacgccgaactcatcgtcactgaaaagcgaccagcaccgtacgaattaaacgattcaatagcagcgctgaagctcggcgtacctgaacacctttatcatcacgtttggtgccttatttacgaaatcgaagcattacaagaggaggccacaagatgatcgataaattgacgaaagatcaactcgaagtaatccgaaagcgttcggagaaggctacggaaggcccgtggcgaatcgggaagcaatcaccaaacggattaaataatatcggaacaattggcggattactgactgcacaaacaacggatgaagaggacgcaaatttcatcgcaaacgcccgccaagatattccgtcgctactcgatcacattacttttctaaacgaagtaatatcgagctgccgatgcgctgagtgtggcgatgaattgggggaagattgggcaactaacaacggagtagcgttttgcaattactgtgctggacttaattctttatgaaatctgtattttaaagagaaggtgatgcagtgaaagagtcgttgaagaatgattttcaagagtttgtgagtattgcaaaaagctttcttgctgtttctggagcagtcttttggttattgataatttcacttgtttttgctggaggctattaaaatgaatcaatcatataaatttagtctagaaaaattaccaatagaaagcttagagaacctgaagacagacatacaaaatagaattaatgatggcttgcgtactgataacaacgtatacataaaagaccaaagaagaaaacttcaaatctttttagacgagctggttagacgaagtacacttgttcactaaaggaggtgaatacaatgccagaagtactttacggatttggaagaggagcgtaaaaaagaggggattaatcccctcataaattaatgaaattgaccattcatgctttgctgagccatgcgaaccaaacgttttgtgatttctccacctactgagccgtttgctcggcttgttgtgtctgctcccagttgaacaccaaactcagaagcaatttcatacttcatttgttcaagggcaccagcagcttgaggcacaagtaattcattgctgttgtttgatctgttttgttgagccatatgatcatctcctaaagtagtatgtaaacaagtttgttcaattgtagtgtgtggagatgatttgaaaatatacacattaaatttgaagtgaggtgatttaaatgtcgattggtcatggagcataagttaacacgtacttaaacaaagaagggggataaaatgaaaatcgattatgtttcagatctgcatattaatcactggataccttggaacaataaccaaatcaaatgggaaaggcgaacaagggagattattagaaggttgatatctaatggaaatggagaggtattaatcattgccggtgactttactgagtggaatcaacagacactatgggtacttgatgaagtagcaaagcagtatgaaaaggtctacttcacatatggtaatcatgatctttatctactcagtaaaaatcagcaacgaaaatattccgattctttgggaagggtgcatgatttaattcagaaggcagcagacatcaataatgtcactccattaataaagtctacggatacatacaaaggaaaagcctttgctggagatgtcatgtggtatcttccaaaaggaaatgaaggatgggatttcttcaaaggtgtctccaatgattcaaactatatcagcctaaatggatacaacaaagaagatggggtaagagcaatgtggaaagaatcaatggattggtatgatactcttgaaaactctcacattgatgtatttgtctcacatgtcccacctgttcacaatccctgttctccgtttgagcctaacagctgctatatggtcgatttgccattcattaatgccgaacattggatttgtggacacgatcatttacaagctgagttttatatagaaggaacgagctttcacatgaactgtattggatatccgtatgactatgatatgtacccaagagtaaatgagataccaggtaatcaagttgatacgtataaaacgtttgagctgaagacatttgaaatttgaggtgaaaccgtgaagaaaaaatcagatgatgtgtggacagtcgtgtataaagatcatgatgaagaacctaatgcttattcatactattccaaattagatgcagagacggcaaaactgacaattgaaaaatcaaacggtactcagttagtcaatgaaaaggaagaagtcgttgggcatattcatttagactgggtctatttaatccaaggaaggttatttaaaactgactaagatagagaaaataaaattctaattttatacgaaagaggggggattgaatatgaagagaatggagcagccggaaattaacgatatcaaaactttaaaagagaatattagtaatttcacagtggagctggagaagggggataaagtccaaattattgatatcggtgaaagaggttatgacttgcggcatgttgacagcggtgaagtgttgagggaatgtggatgggatttattcgtttaaaatattgatttcctacagaaacgtggtgatgacttaatgagttcatttgaagaattggctagagaaaatgaaaaaattgctagaaggaaagcaaaacgtattcaaagagctagagaatacacctatcatatcgaactctccttttcaaaagctgatccgatattaaaatcatttcttactcagtcttttgatgaattaagaaagattttaaagaatgatgataaagaagataataaatataacatttgaatgaagaggagatggctgtatggcaataaaagagaggggtaattcacttatacaaatatgattttgaagatggaaaatatgctctaaatataggttgtgatgggtctgccaacttagacacaaaggcatttagaataatgttaaatcaatgcgtagggcatcctaacatgacgctatttgatgataagtctaaaagggataagaggtatgtaaaagcaagaagaatgcttttagatgcaggatatacaatagaagaaaaatagataaaatgtttctaattttataccggaagagagggattactactatgattgggaaagcactatacaataattcatggtttgaagttgcaaatatcaactttgactcagggcatatcataattaaaaacgacagtgaaaactcgttgggtttgagaataggtgaaacactgacacttgaccttgattacgtcgatgatgtaaaaattggacttttgctgtgaatgcataaaatgctgacttaatttgtaaagggaaattaaggttggggtcgtctgactttataggaggaataaaatgaatgaaatgttttggctacatcaatatgcaatatatttaaacaatcaaatttggtctttgcgagaatttggcaaacttgaaaacattagattagaacaagctgaagacattattgaatgcttacccaaaagcaaaattgctttagagtttgcaaacagtcagcaggtaaatttatcgctaaccaactaagagcatctgtgtctgaaataatgaaagaagaacctcataagtgtgagagggggaattaataatgagtatgcaaagaggagcaaatacaccggtggagttggctaaatcaattcagaaactcggaagggaaatgctagaatttagggactgtatcaatggtattcgtgaaattgttattactctagatgaagatgatgggtcatttacgattacaacagattaaaatgttgatttcatttagaaagggggacggggatggacgattatctacaaatacttaatgaggttaaaccgatagaaatgctattaacaacaaaagaattcactgttcagatgataagtgtttactacgaagttcctgaagatacaattaaatcagtacttaaaaggaacatgaaactccttaagcaatatgcagaaataagaacagttgaaatgaaaatattgaaacatgaatcagcaatttttaaatcagccagatttaaaaaagttagaaagttatcgttagtcaatatatacggtttccttaggataggcttacttttgcacaacagtatcatagcgagggaatttcagaaaaatgttaggcatcttgacctgccggaaaggctaacagatatcgtgatcgggagtgccgaatataaagcaaaagaaaagaagctgggtttatttatcagcacggcttttagtggcattttcagtatcgagcagcaagtaaaatgtggagcttattttattgattatgtaatagataaaaaggttgctatcgaatgtgatgaacacgggcataaatattactcaaaacataaggaattggaaagagaagaatacataaaaagaaatggatataaactaattagattcaatccagatagtgaggaatcaatttttaaactgatcaacagagtatttatggaatgtcaaactgcataaaatcggtcttttaaaaagaaaggaatgattttttgataacagtagttaaaggcgatattctaagtgcatctgaggatatcatttgtcatcaagtaaattgtcaaggagttatgggtgctggattggcgaagcaaatcaaagaaaagtatccatctgcatacagagtttataaatacatgtgcgacaacgtagtatacaagcctgacttgttaggaaaggttcgggagtgaaagagcatgacggaaagattattgcccatatcttcggacaactctcttatggaagagggagggtattcaccgactatgaagctttaaagtggggcttagagctaattaaaacctcagctatgacaaatagaagatccattgccttgccttatggaatcgggtgcggcttggcgggtggaaattggaatgatgtgaacaaaatgatcgaatccatcttcgaggactacgaagtgacaatttacaagttaggtcagaactaattttaggataaaaataaaataagatgattagggggtgagtagagatagctgaagaacttaaaacaattcaaatactgtacaacaaaatggaaagacaaatgagcacagttaaggaagctctcgagaacaaagaatacgaaagagcccaccgtaacctaatcaacctttcggataataatgaagaattgatgcaggaaatcagatggactcaaaaagggattaagatttaacttttcttctttctttatggttccattcgtacagctcttcaattgagcaaccaatggcatcggcaaaagtcatgcccgtagctaagttcatatttgctttagctccacttatataatcgtggatacgttgtctcgggtatcctgtgcgtttgaataggtcatcaactgtgaggccatattcaaacattaattcatttaaacgtgggcgtaggggtgtccattgcttcatttcgtacacttctttcaatattaattgacataaaacagtgtagcaaaggtttattttaatttcaattttgatttcaatattttaggagagtgattgattggcaggtacaaaccagggtaaggtttttgaagcaaatatagaaaaatcagctgcagatcaaaagctgttcttctacagaattaaagatgtaaatccagtgtttttaaaaaggggagctgcagtatcaaaaaacaaatatgactgctttctattctttaagggatacttgttcccctttgagcttaaatcaacaaaggataagtctgtatccttcagtgaaaagatcatcaagccacaacagattaaacacttaaaagaggctactcaatattcaaatgtaatccctgggtttctgtttcaatttagagagccagaaaataaagtttatttcgtacatattaatgatttccttacatataagaacatagctgaaaaacagttgaaacatagatataagaataaagtaaacaaagccagcattccaattgcaatttgcgaagagatcggcacagaaattcgttcgatgaagaaaaaagtaaactatacatattacttgaacaagctttgcgatgatttgattaaaaaagaacagcagagtgtgagcgctgtatgagtgagttcgttaaatcatcttcaaagcaatcgtttgaaatagaaaaatatcatataacgattgaaagcatgaatcaaccatcggctgaagcaattaagaaagtcaatttaaaagtgaatgaagtaatgtctaatttattagcaaaagaaaagagccattaatctggctctttttattgttgtacttaaactataatgcttgtgacgattatcgggatgaccttaatgccggtcgcgatgaatcatattgccggcggggaaggcagcaaggatttcggtgatccggctaaccttgccctcggatttacggtgctcgtcatcatcgtgctgctttatcggtttacaaaaggatttttgaaatccatttcgattttaatcggcattgtcatcgggacggccatcgcatattttatgggaaaagtgcaatttgacaatgtggcgaatgctgatgccattcaaatgattaaaccgttttacttcgggacgccgacatttcatgcggcaccgattattacgatgtccatcgttgccattgtcagccttgttgagtcaaccggcgtctatttcgctctcggtgatctgacaaaccggcgcctgtctgaacgtgatttagcaaaaggctaccgtgcggaaggcctggcggtattcatcagcggcatttttaatgcttttccgtacacggcttattcccaaaacgtcggcctcgtgcagctgacgggaattaagaaaaacacggttatcggtgtcacgggcgcacttttaatggtcttcggcctttttccgaaaatcgcagccttcacgaccatcatcccgtcttccgtactgggaggcgcgatggtggccatgttcggcatggtcatttcctacggcattaaaatgctcagtcaaattgactttaaaaagcaggaaaaccttctgattgtcgcgtgttcggtcggattgggactcggtgtaaccgtcgttcccgatatgtttaagcacctgccgtcttacttaaatctgctgaccacaaacggaatcgtcgccggaagctttaccgccgtccttttgaatattatttataatatgattcctaaaacgaaaaaaacccttgatgtgacaagggttcaagagggttagttatccgtctttcttaaaaaaataacattttaataacatttctttatgaaatcccgagatcgaggatgcttccgaaagtttgctgaactttttgtgaggcatcctctttcatttattattttcattgtttgaaaagaaacaaattgagtgatgaggcatccgccttatttcggccgaaaaaccgtcccggactatatgtacgtgaacgagtatcttgtgcacggatccttacaaatgagagtgaaaagaagggaaagccccttcttttaattaatccatccttcaaaagttgcgcgatagaacccttcgattatctctactttcttaaggtaatatgtaacaccattcttaacagttgtatttgggatatcccatctatgaaggtaatccattgtaaaagaatctttggtcgcttgtgtcgaaatttttgtttgagttgagtcgctatttgtatgaccagggctagatgcaaaagcaggggcagcggaaacgagtaaagcgagagacaaggcagaaccagttaaaactttttttaatttcattttgaacactcctttgttttttaatacacttgtattattacatacaatacaaaaataaccaagggtttttttgttaatattttgtgagcgtgaatgtagttaggggcagtcctttcattcactattgcggcttatttcagaatattgataagtatatagagaaaaagagttgaatattgctggcttctggtgaactttagatatttcaatgcttttccaacggggaagatgtgatagtaacttaatcaattgtacaaaagtaaaaactttatttaaaatgttataaatacggattttcaatataggaggttatctgatggcagaaaagaaaaaagctttaatcattgtggatgtacaaaaagcctttgatgataaaaagtggggagaccgaaataacgtaaaggcggaagaaaatatcagcaaaatactgaaattatggagagaaaaaggatggacagtcatatacatacaacatatttctgataaatctggttctttattttatccaaaaaatgagggggtcgctataaaggaaatcgttaaacctatggataaagaagtcattataaccaagaaagtaaacagcagctttattgggactaatctagaagagctcttaaaagcaaatgatataacaactgtcgtaatcactggcttgactacgccgcactgtgtttcaacaaccacaaggatgagcggtaatttaggatttgatacatacctgatttcagatgcaacagcagctttcggaatgagagaccaaaatgatacatattatgatgcagagactattcacaatatatctctggccacgttgcatgatgaatttgccacaatattaacgactgatcaattaatcaatgattttataaaaacaaactgattaacattatggctaaggccggcggtagggataggcggctgaaattcaggcgcatacaaggacctcttcggaaaatacgggggttgccgactcttttcatcgtcgcaatatcgattgaaaaaaggcatctgcttcagatgctttttttgtttcttgtaaaccggtttcggtaaaaaatgacggttaacggtctgattcggtttcggttttgaataacaaaaggctttactaatcagcgaattattcagtgctgagtctggtgttttttgatttcctcgaatagattggcttgatcatctttttgaggctgaggctctttgttatgacattttggatcgatcacatttttaaggtctttgatggttaaaggcttacagtcatcttttaattcgtaacctaattgtccattagcttctaaagtggcatatttaattgtgtttatatttgaaatgccaagaagtcttaaacgcatttcgagttgatctgctgtcagtctcagcttctttaagttttctatattgagttggccgtcttctataacgaatttagattttccggttaaaaagattcaatccagtttacttttacttgaaaccattccatcaaaatcaaagcgctaaaaaggatagacgcagcgattaatgttttcaataaactggtttctaaaatggggtgaacgataatcgtaccgattgaaatcatcaccattgtctgtgcaatggtcatttgtgcagtggattttctccctgaaattctcagtaagatcattccgaatacaattataattaattcttcccaagcaaatctcatgttatcaccctgggttgtgttttatcaaaaataaaagagcaagtaagaggttttatggggtacttgctcacgaagaattattgcccttacatttgataactaaagaggggaggaaaaacattccatggccttttgtttacgtcagcatatatcaagaatagagttaccttaacatgagctggggaactcaagcgtccatagaaatgttctgaaggatctggattgattcttcgtaaagagttgaggctcggcttttggatagacatgtgattcactaaagtgctgcaggatccgatcaaaaaacctatggcaggagagaattttagattatgtgtttttgcgtctaaaagcagaaaacagtacgactgataatgatcatcgggtgaaatgaaattacgcacctaggtgctgtatgttggatcaattataaaaggaagtgaaactagaaaaaggggcaaagcccccttcatattagtaacagcgctcatcattcccataccagattccgttccggaaagaaactccttttagataccaattgttgatatcgtccagcagttgcaaaagcagaaggtgctgatacaagtagagcaagagataattcagaatctgtcacaatttttaattttgacactttttaggtacatgttagcaatcatttattctcttatcggcacggtaacatacggattatttttagttgttgcttagaacaaacattccgcgtcatgaaaaatcagcttttgtagacggctgtccaagtgccatcagcaccatggaaggtgatgttgtctaaataataggtgattccattccggtaaattgaagtaggataatcagggccggaaccattaagtatgaacgtcgccaaagcagatacttccttcgttttactttctgcagaaggtgtatcagcaggacctgcggcaaaagcaggggcggcagaacagagtaaagcgagtgatagggctgagccggctaaagcttttttcattttcattgtaaacactccttttctttttttaatacaattgtattattacatattatgttaaatatgtacatgtttatctttgttaattttttgtgaacaaacagataatctatttaaacgcagagatgaaataagtatgatgatgaagcaattatcatctataaatataagatcaggaagtggctgattttctcgaaaatcatctgctcttgcgaaatgaggagttacatgacatttacggaacgggcggtagccattatcaaacagattcctgaaggaaaagtgatgacgtacggtcaaattgccggtcttgcgggaagtccgcggggagcgaggcaggttgtgaggattcttcactccatgagtaaaaagcatcgtcttccttggcacagggtcatcaatgcaaagggtgaaatcggattaagagatgaagagatgttttctgtacagaagctgtctcttgaagctgagggcgtagcggtcacgtcagacggacggatcgatctcaatttatacgtccatgatccgaatatgtaaaaaacctgccgtatatatcggcaggtttttcagttatatgctgcgagccggccagaaaggttttgccggatataaggccattcctcccgaaggatggagtagtaggcggtatctctgaggccgccgtcgacagccggaatatgcgcgcggcggattccttcaaattgggcaccgatccgcaaaatcgcagttcgtgagcgctggttgcgaacatcggttttcagcgtcaccctgacagcttgccacgcgtcaaacgcatgggtcagcaacagaagtttacattccgtattcacaccggtccgctgtacggcagaggcataccatgtgctgccgatctcacacatttccggggctgcgtccgccggccgcgtaaaaacttccgcatccataaaccgcgtgcttccgacgattcggtctgtttcaagactccgtactgcaaatggcaatgcaagtcctttttcataatcggaaagcgcacgttcaatataacgctttgtttcttcgattccgtcaggaacatgggtgtaagcgtaagtcgtcctatttcccgaagcagcttcacaaagtgcctgagtgtgatcaatcgtcatcggctctaactgaacgagtgaccctttaagaatgacgggcttcagcattcttatcacaaccttttttcatgaatgggtcaagtatagtcgaacggcttatcattcaaaagggccaattttaaattaaaatggcatgtcagtgaaatcctcgattcaaacttatgcatacattcaggaaaaaagcggaaacctttatgtgaagaggtgatgggcatggcatatgtgttgtcggtcggaacgagcattccggaatatcatgtctcgcaagaaacggcggcggattttgcgagagggatgtttgccgattcatttaaggatattgatcggctgttaaaagcctttcaaaacggcgaaattgaatcaaggcagtttgtccggccgattgaatggtataaaacggcgcggggtttttcagaaaagaaccgcctgtatacggaagaaaccgttaagcatagtgcggatgcggcgcttgattgtttaacaaacccggattgtttaacaaatcccttcccatatgaaaaagtggatgcgatcttttttatttccagcaccgggctttcgacacccagcattgaagcgaaagtgatgaatcagctgccgttttctgcgaaaacaaaacggataccgatctggggcttaggatgcgcgggcggagcggccggcctgtccagggcgtacgaatactgccgtgcgtatcctgaagcatacgtgcttgtcatcgcggctgaactctgcagcttaacctttcagccgaacgacaagtcaaaaagcaacttgatcggaacttccctgtttgcggacggaattgccgcagtactaatcggaggggaaaaggcgaaccgaaacgacgtcaaacagccgcttcttccgcggatatttgccactcaatcggtgatgatgccggatgcggaagatgtgatgggctgggaattcaccgacagcggttttcaagtcattttttcaagagatattcccaccctggtttcacagtggctgaaggacaatattgatgaatttttattagaatatggtgtcggtcctcacgacattaaaacctttcttgcccatccaggcgggaaaaaggtcattgacgcctatttaacgagtctttcaatggacatcggtcagcttgcggcatctcggaaggtgctgcaaaaacacggcaacatgtcttccgcaactatttttcacgtgataaaagaacagttgctccgcggacggcagaaagaaaacgaaaaagggttgatcggcgctctcgggccgggattttcgtctgagcttttgctgttcagctgggaaaagggggcttcttaatgttttggctgtttatcatgctgcttgcggcccagcggattgcggagatgatcgtggcccggcgcaatgagcaaaaggtgaaaaagcaaggcgcagtcgaatacggagaaggacattatccctttctcgtcctgatgcacgtgctctttttcgtctctcttacagctgaggtggcggcgtttcaaaaaacgctttctccaaggtgggccgccattatatgtattattttatttgtacaggggatcaggtattgggcgctattatcattagggcggtattggaatacgaaaatccttgtcgtgccggatgcggagcttgtcagaaaggggccgtacaggtggatgaagcacccgaactacgcggtcgtcatcttagaatttatttttctgccgctgttatacggagcgtattggacactgtttctcttttcgattctcaatgcctgcatgctcactgtgaggattcgcgccgaagagaaagcgctagaagaaaacaccgcaaaatagagattgaaaatcattctcactcatgataagatgtaaatatgaaaatgattctcattcaaggtggtgccgaaaatgacaatgttatttttatttgcagccgtttgtacatacagtgttttaattggtttcgtattgaaaaaagtttcgaataaatcgatgtcttcttaaacatctgcggtttttcctgccgcgggtgttttttctttatcagctgccgatatcggcggcttttttgcgtttcctgaagaaaagtgagccattcttgtgtaaaatgggggagaggtttttttcagagctttctaaaaatgaaaaacgtcatttgatgcgacagacacaaaggggtaaagacacatgacagaagaagaacgccataacagggagattttcagcagaacgggtgccttatacgcacaatttttggatcatcaggatgaaaaacgggccgatcagctcgcggccattatgaaaaaagcggctgatgaagaggtttatatcgcgtttaccgggcattattcggccggaaagtcctctttattaaacacattgctcggtgaagacatactgccgacaagcccgattcccacaagcgccaacctcgttgtcattcggcacggtgaagataaagtcgtgcttcatacgacggggggggcttatgcagaaattaaaggaagttacgataaagaacaagtgcagcaattctgtaaagacggtgagcaaattgaaacggtggaagtctatgccggctttaaggagtcagagccttatgcggcctacattgacacaccgggaattgattcgacggacgaagcgcactttttatctgccgcttcggttctccatcaggctgatgctttattttacgtcgttcattataatcacgttcattcagaagaaaatatgctgtttctcagctccatcaaagaccgtattccgaatttgtttctgatcgtcaaccaaattgataggcatgatgaaaccgaaacgaagtttgaagagtaccgcaggcaggtggaagatatgcttgaaggcgcaggaataccgaaagaatcgcttttctttacgtctgtcactgagcctgaccatcctttaaacggcatggaacagctgaaaaaacatctgcagaagctgaaacagcaggcaaaaacaaatttatggtccttaacggagagaaaagttgcacacttagtcaaagagcatacagagatgctcgtaaaagatgataaaaacggcagcggagagcagtttgacaaacaagaagcacttgtccgttctgttgaagatgagcttaaaaaagccgttcaacaggctgaaatagcagagaaagacatcagaaaagacgtgcagaacatattgcaaaacgctaatctgacaccctttgagatgagggagcttgcatctgcttatattgaatcacagcagccctcatttaaaaccggattattcttttcaaaagcgaaaacggcttcggaaaaagaaagaaggcatgctgaattttttgccgatattaaaaaaagaacggaaggggaagcggattggcatattatcgacacatttacgaaagcggccaagcggtatgaagcggattcggacgaactgatcaagaaaatccaggcgtaccgcacaccgctttctgatgatatcaccgctcaggcccttaagcagggagcggccttttcatctgaatacgtattaacttatacgaaagacctcgctgaaatgatcagaagggaagccaaaagacagacagcggaactcattgaggagctgaccgcttatgttcagacaaaaaacggaccgctcattgagaacttgaaaaaccggctcgaaaaagaaaagaaaataagggatgagctcgcgcaatcggcaaaagaagaacgcaatgccttggaaaaagcagcccgcgtccgcgctttgtgggaagaagaattgacctgtgatacgggaagcggcgactggtatacgcgaaaaaaacgccttgcgaaagtgcccgtccaaaaagagaaaccaaaagaggctgtacagcatgaagtaagcaagcccgaaaaaaatgcgatgaaggaactccctataaaagagcagactgatcggttctatgagcttgccgggattcttgaatcctcgaacatattaggaaaacaggcagaagcctttcgaagcaggattgagcggcttgaaaaccgccagtttaccttggcgttattcggcggattcagttccggtaaatcatcatttgcaaatgcgctggtcggtgaatacgtgcttccgtcatcaccgacgcccacaacggctacgatcaacaaaataacgaaaccgcaagacggcaaaccgcataaatctgcggagatcgtttttaaaacggaagaggagctggatgctgaaatgcttcagctgactgagctgaaagacgctgacgtaaaggggcgttcactgaaagagagatggaattatgccattaaaaagggaaaaattccggatgaactcatcccggtgattcagacgatgctgcaggcgtttgatgcgtatgaagaacagatccgtcaaaggctgacactgtcggtgccggttgaagatttaaaaccgtacgcagccgaagaaaaaacggcctgctgcgtaaaagaagtcaccgtgtattatgattcgcctctcacgcaaaaaggcatcaccattgttgatacgccgggagcaagcagtataaacaagcgccatacggaacttgcctttcaatatataaaagatgctgacgcgttcttttatatgacgtactatcagcattctttttcaaaaggagacaggtcctttctgaagaaactcggcctcgtcaaagaatcattcggcatggataaaatgttttttgtcattaacgccgccgatctggccaaaaccgaaagcgaactggaaaccgtcaaagactatgtccgctcagaactctcaaaagaggggattaaccggccgaaattatatcatgtctcaagtaaagaagagcttgcgggtaaaaaagcagctttttataacaggttctctgatgtaagaaccgggcttgagcactttattgaggaagatgtaatgagggccagctgcgcccagctgaaaacagaggcggacaaattgtgcgatatggtggaacagcttcacgaatctcttcaccagtcggcagaagaaaaagagaaaaagaaacagcgtctggagttctcctatgaaaaagctctcgctgacatttcaaagcgccgtacgtctgaggtcatcattcgaaaagtgatgaaagatacggaagaacagctctaccacattaaacatcgcctgacgttttatgcgaatgatatgctgaaaaccgccttccatccgggtcttcaaaacggtgattggaaacgaaatatatcagcggcgctgaatgaagcgctcaaggaattccgttttgaatatattcaagagctgaaaacgctcgatatccgaatgaccggttttattgagcgccatatgactgaggaatggatggaaaactgtcagaagaagcttatggaagacggagatttctccatttatgtgagcggcgaaaacgaatttgccgttcagctgaaagaggtcgctccggtcattgacgtctcggcattctcacatcacgtaaaggaagttaaatcaccgaagcagttttttgaacagaacggaaaagcagcgtttgtagaagggctcaggctgagcctgcaaaaagtgacagaaaagtggcttgagcaggagaaagaaagcctttcagagcgatatgctgagcaggtgcgccgtctgcaagaagacatggcggataaaagcctgtcccagatccgcgagcagcgggacacttatttacaaggtcttgcggaaaatacgagtgcaagggaaattgaacacctttatgaagccgaaaaagcatggaaaaagaaagatgaaatgctgaaaatttaaaaatccggttggcgggcagataacagtcgtggtagactaaaatgaaaaaaagcgagatgaaaccttttatgtcagaagtccataaagcaatttcagcacattccgcaaaacagcatcagcacgtcaaaacatttgtacagcttgattatgagcgtgaacaggccattgaagaagccattgtaaaatgcagacagaataaaccgttcacgacagatgccatcaatggcatcaccgcaaaaatgaaccagctggcgaaaaagggcatcgtgccgcaaagacaattcgtaagtgaagagatggtgaaagaattcgtcagcagacagtaatggatgaacctgccgcgtgtgtcatcagcgcttgctgtacatactatccgtatcttctctaaagggggatatgaccatgggcagaacaaaactgggaaacagaaatgctcagcagaataacaatgccaaaaagaaaaacggcttcggacagaaatttgattcttatgccggccgtgaagctgaaaagctgatggcaagcaataaaagacacggtgagtaaacgtgacggcagcatcttccaaatggggggatgctgtttttttaccgccttctttggtaaaataggaacattgaataaaaaaggagtttcgatatatgaataataaattactgctcgttgacggcatggcgcttttgttccgctcgtttttcgcgacggccgttcatcgcaattttatgataaatgaaaacggaattcccacaaacggagtcaacggttttttaaagcatcttattacggctgttgatacgtttcagcccacacatgtcgtctgctgctgggatatgggaagcaaaacgtaccgcaatgatttgtttcaagattataaggccaacagaagcgaaccgccgctagagctgattccgcaatttgatctagcgaaagaagcagcgcgagagctcggttttttaaacatcggcataaaaggctatgaggcggatgactgtatcggtacgctttctgccctattttccggggaagcggaaattacgattgtaacgggtgataaagatctgcttcaattgctgaatcatcaagttcaagtagcgctgctgcaaaagggtatcggtaattataaggtatatacagatgagatattcagagaagaaacgggagttcctccaaaagcgctgattgacattaaggcgctgatgggagacacgagcgataactatcccggcgttaaagggatcggggaaaaaacggcgtacaagctgatccgtgaatatcaaaacatagaccggttattagaaagcctcgctctcttgccgaagggccagcaaacgaaaattcagcaaagcttgaaagaattggagctgtcaaggcagcttgctgaaatacattgcgaggtgccgttagtctgtacgcttgaagaagcgcttttttcattaaagatggaagaggcggcattaatgctcagacgtcatcagataaaaggaattgaaaggatgctcgaaaagctgaacgccagagagatcagctgatccctctagcgttttgtattgcttttttttgcgttgttttcaagggctgatttcgggtctttatgcgcatttccttccatatttccctgaggatttacgcccctggtcagccggcctttattttcttttctcatagctgttcacctcatttgtaggatgaacagtgagacgcaatttcattccggttatttattcagccgaatcgctttttttgcaagctgatcggctgtttggttttgtctgccgggaatccacttaatgaaaaacaatggaaatccggcctttaagcggatgatttcgtcaacaaacggctggaaagccttgtttttaaccgcttcaagatctgcggcccgctccacgatatccgaatccgtccggaatgacacggactcaaatccgcgggcggcacacagcttcattccttcaattaaagcgagaaattcagcttcctgatttgaatggtcgccgatcggaattgagaaagattctgttttcccgtcatgtttaataaaaataccgataccggacgggcccgggtttccggcgcttgcaccgtccacgtaaatttcagcgggcatcatccgtcactctcccttcggtgtcattcgttttgccgcatacgcataagggacagaaatgagtgataccgcaaatttaatcaggtaagttgaaatgaagatgctgaaccatacgcccgcggaataaacgccgataaaggccacggcagtgaagataaatgtatccagcagttggctgagcgccgtgcttccgctgtttctgagccagagaagcctgtctgaaggaaagattctccgaatggctgaatatacataaacatctatcgtttggctgaaaataaaagccaagaggcttccgagcgcaacacgcggcagaaaaccgaaaatcgtctcaagggccggctgtgcgatatctgacgcagccggtttatataaaagagctccctgcatggcgcatgtcaaagcgagcagagtggaaaacccgagccagacggctttgcgcgcttctctgggaccgtatttttcattcagcacatccgttgcgaagaaaacggtgccgtacatgatatttcccagtgtcgccgtaagcccgaacagctcgactgttttgacaacctgcaagttggcgcacaccgtggcgaaaccgatccatacgaataggcccgttttgccaaatcctttataaaacagaagaacaatgataaaatgaatgaccgcaaataagatccataacacatcgttaaacaaaacctgctgacttcctttcaatttgagaatggtttgattatagcacacgcccgtcaactaatgaatggtaaggtgatttcaatgaatcttaagccgtatatcgaaatagaagcaaaaggaacaggccctgtcgcgtttttttccgaagattggctgaccgttccgaaagcgcgcatgcttgcaagagaagtcagccgctttccttatataaaagacatttattttgaggatgaaaaaggcgcgagctggacgcttaaagaattagaaaagcttactgaagagcttgcgcacgaacctgacgacattacagtgtatttcgacggcggctttgacaaaacaagcgggcgcgccggactcggaattgtcgtgtattattctctcggcggcaagcggcaccgcatacggaaaaacaaaagcttaacgcttcagacgaacaatgaggcggaatatgccgctttgtacgaagcccttaaggaagtgcaggaacttggcgcaagcagaaattcaatcacgataagaggggattccctcgtcgttgtgcatcagcttgacggcagctggccgtgctatgatgaaacgcaaaacgaatggctggataaaattgaagcgctgcttgaatccttaaagctgacaccgacatatgaagccgtaaaccgaaaggaaaatcaagaagcggatgaccttgccagaaaaattctctcggaccggcagattgaaagccgcataacattagaaggtaacggagatgactgatattggataaaaaaagcatttataaagaattgactgagcttcaggatgaatattgcaaagactgtttcgtaaaaaagcattttcgcaaagagtttggaaaaacgcacgctcattctttctgcatcaaccaatgcacggtgggggagaagctgaaagcctacggcaaggtgctggcaaatcaataaaaaataaaaccgcagtttctgcggttttatttttcgaattcatcgagctgatgctgacaatcgtcgagaagcattcgctgcttttgcagaaaatcctggtcgagagcttgcagttcactggattgtgacatcgttctggcatcctgaatcgcctggtaagcagattccaccaaagttgaattttggccccgggttgccgctcccgttgttttctgggccgtttctaccgctaattcaagctggcgtttatccgtcagtccgtttggaaaaaattcagagtccattaaaaaacacctccgcaaatagtttggagtttttttttagaaatatgtacggaaaatagaaaaaatatataaaataagccgatataactattgaacctgattaattagggcttatttactattattcagggtatcttgggagagaagggaaaaaaccagccgtgaatgataaagatttaaaaacaatccttcagcagacatttaaagaaatatacggtgatttgggaagtttagcggaaatggcaaaaaaaggaatgccgtcaatggagaaacaaattgaagaaatcgagcagcgctgcaagcagaatcttgtcgcaattgagattcagacggcaatcaaataggagaggcatacgcctctcctctatttgtcatctgatcaacatgtattgagtttagagttttacaacattagaagcttgaggtccacgattaccttcgacaatttcaaaagaaacttcttgtccttcttctaatgatttgtatccttctccttcgatagcagtgaagtgaacaaatacgtcgtctccgccttcaacttcgatgaagccgaatcctttttcgttattgaaccattttactttaccgttttgcatattgcttaattcctcctagtactgtagcaccttcgtgctaaaaaaaattttgtcatcatccaaccgtacgtatgtaaacgttgttaaatgatggttcaactatacaccatatgggagcggacgtcaagcggccgctccctattttttatctttatttttccagtaacaaagcttaaccggaaaaaaacaaaaagcacacgaatcgttcgtgtgcttttcttttacgataatgccatatccgccttcccggccatcatttcagattcttttataatgtcctgcaaaatgacttcagaagagttggggaggtgaaggcttttaatattgtccttcatccggttcagcttctcctcatccgcaagaagggaggtgaccgactctaaaatttcttcgtggcggttgaccacgacagccgcaccgcgatcttcaaagaaaatggcgttttctttttcctgtccgggaaccggtttgtacaaaataacgggtactccgatcgccgttgcttccgtcagtgtgatgccgcccggtttcgtgatcatgcagtccgtaatacggaacagctcgtcaattctttctacatagcccagaactttcagccggtcggcattgtcaccttccaagctgctgagggattctttcagtgagctgtttttgccgcataccaccacaacctgcacctgatcgtcatgaacgagattttcgcacagttcttttacgtttttcagcacaccatgcgctcccgccataataagaagaacttttttgtcgggagagagattgtattttttataaatcggctctttcggcatcgattcctcgaattgaggcctgatgggaatgcccgtgatctttacgttgttcgggtgagtgccgatttcaatcagtttttccttcacgtaatctgtggcgacataatatttatcaacattttcatgaacccagattttgtgaaggcagaaatcggtcataacgttaaacgtcgggatcacttttccggttctccgtctgtattccggtacgacaatcatcggaaatgtattgataataatgtccggcttatgctcttcgacgagctggcctaaacgtttatttcccattttaaaataaatattgaatttgcgtttattatagattttgtcaactccgtaataaaacaaacgataaaactgtttcccgattgagaagctttttaaataaaggtattgagtaacctctgaaacaatcggatttgactcttgatacaaattagaaaccgtcacatctaagccgagacgcagacactgttcgtagagcgttttggccacttgaacatgcccgtttccgtaatttgcagtcaaaattaatacttttttattggtattcaagtaaattcacctcaatgtaatcaacaacaagcaagcttcatgcatcgtaaggagttattgtctatagataaacataacacaagtgcatcattttataataagtgcggcaacatatttaaactaaatttaattgatatgttccattattttaaagttttgttatacgcatactgaatcaagagtattttatcatatttttgtcaccgtatcactcaaaacaaaaattaatcccattcatacggggtttcctgatatacgtaataattcagccaattcataaacaataacgttgcatgagctttccagcggttaacaggttctttcccgccgggcgcaaaatagtgcttaggagcttctacgtttgaaagatttctctctatgtctctctcatactcctgaagtagcgtatcggtatcatattccggatgacccgttaagaaaatctgtttttcgtcttttgaaacgattaaacagaccccagcttcctctgaaacgctgagcacatccagatccgaagccgattgcagctgttccgtattaatatctgtatgccgtgagtggggcacatagtatagctcgtcaaatcctcttaccaatctctcatgttttttaagaacggtatgctcaaacacaccgaagattttcttcggcagctccactttctcaatgccgtaatgatagtataaaccggcttgagcgccccagcagatatggagggttgaagtgacattcgttttgctccattccatgatttccttcaattcttcccagtaagaaacatcttcaaacggcaggtgctcaatcggagccccggtaataatcattccgtcaaaccgtttgtggcggatgctggaaaaatccgtataaaattcatccagatgctgccttgccgtattttttggagtatgtgtgctcggaattaagaacgtaaagtgaacttgtaaaggtgaattcccaagcatcctgaggagctgggtttccgtttggatttttttcggcatcagatttaaaatcacgatcttctgcggccggatatcctgatgaaaagcccggctttcatccattacaaagatgtgttcactttcaagcacctgcttagcgggcaggtgatttggtatattaataggcaacatgccacctccgttattccccgttaattttcttcattatagaaatttttaagccatttttcaatccatcccggcgtaataaaccgcatttaacgcataatgacagggataaaagcggcaaatgggcataaattcggagcggctctttattatgacgggtaaagagccgtttggttcctcgaaaaaaacgttttccgttaagtggaaggaaaaagcggttgccgtttgttttgcagtgtaaaacaggtaaaataaatggagaatgtaaaaaggaggccgcagatgacaatttacgatataaacgtacggaccataacaggcgaagacatgacgctatcggcttacagaggcaaggtgatgatcattgtgaatacagcaagcaaatgcgggttcacatcccagctcaagcagcttcaggagctctatgatacatatcgggaggaaggtcttgaaatattaggatttccctgcaaccaattcatgaaccaagaacctggaaacgaagcggaaattcaagagttctgtgtgaaaaactacggagtcacattcccgatgtttgcgaaagttgatgtcaatggagcagacgctcatcctctcttcacatatctgacggagcaggcgaaggggatgctcggcacaaaagcggtcaaatggaatttcactaagtttatcgtggaccgaaacggtgaagtcaccgggcgtttttcaccgaacgtcaacccaaaagaacttgaagatacggtgcagaggcttttggcccgataagaggtgatacggtgaacgaaaaagagcagctggaaagcgtcaggaattgggtcagagaaaagcttatcaatgaacgaacgggccatgactggcttcatatttcccgggtcgcaaaactttctgtgtacattgcaaaagaagaaggcgccgacttatttgtcactgagacggccgcgctggttcatgatctgattgacgccaagctcgaaaaaagcgaaaggctgacggcaggcgaagtgacagaacggctggctgctttcaacatcgcggctggctccattcaggagatcacggatattatcacgagaatgtcattcagacacagggaactgctgataaagcggccgctttcattggaggggaaagttgttcaggatgcagacatgcttgatgcgatcggcgcagcgggcatcggcagggcttttatgtttgccggcgcgaagggtcatccgatgtacggaactcaaacaagtgtgctggcccatatagaggataaattaatcaagcttaaaggcttaatgaatacaaaagcgggggccggtttagcagaggagcggcatcaatttcttttgcagttcgccgcccgtatccaaaaagaggccggcatttgcaaaagctaagcggcgcaatagaacgcttgtgccgactatgttagaataagtgtcagattgcgcataggaggaccaatatgaagattaaatcaatagaaccgacgccgagtccgaacacgatgaaagtgattttgactgaagagcttccggcagggaaaagcaacaattacaagcccgatcaggcagatgatgctccggttgtcgtacgtgatattttaaacattgaaggagtaaagggcgtttatcacgttgccgatttcctggctgtggagagaaacgcacgttttgactggaaggaaattctgcctcaggtccgttccgctttcggaatggaacatacggagcagtctgagagccgttctgaacaggaatcgttcggtgaagtgaaggttttcgtacaaatgttcagcggaatcccgatgcaggtcaaattgacggacggcgaacgtgaagaacgcttcggccttccggaacgtttccaagaagccattttaaagctgcgttccgaagcttcaaatgttgtatttgagcggacttggaaagaacaaggcgtgcgcttcggagattttaccgaaatcggacacgatgtcacagaagagcttcaggccgcctacagtgatgagcggctcaaacgcctgacagaagcagccgcacagcaaaagggtgaggccaaacctgcagtgcagcggaaagcttataaagtgacactggacatgcttgatgatgaagactggaaacagcgctatgcccatcttgagcaaatggatccggatgaagacgatttaccagtattggaaaaggcgctgcatgatccgaagacttcgatcagaagacaagccgtcgtttatttgggaatgatcgaaaagccgtctgtgcttccgctgttatacaaagcgcttgaagacaaaacggtgacggtcagaaggacggcgggtgactgtctgtcggatctcggcgatgcgagcgccatcccggccatgataaaatcgctcagtgactcaagtaagctcgtgcgctggcgcgcggccatgtttttatatgaagtcggcgatgaaagcgcgctggaagcattaaaagcggcggaagacgatccggaattcgaagtcagcctgcaagtcaaaatggcgattgaacggattgagcacggagaagaggcgaaaggttcagtctggaaacagatgactgaaagcagaaaaaaagaacagttataacaaaaaggtgcgccatgcaccttttttatttgaattcactttttataaaaattatttagaatattgttgaaaaatgattcaaaactctatatagtaagtacaatattaattgttggagggtttttatcgaaatacagaaagaatagaaaaagcgagacagggcaaagacactgtaaaatttgcagaacgcgccctagaataaactgaaaattttaaaaatagtgcacagtctaaaaacagtagggggatcaccatggcagaattacgcagcaacatgatcacacagggaattgacagagcgccgcaccgcagccttcttcgcgctgccggcgtaaaagaagaagacttcggcaagccgtttatcgcggtctgtaattcatacatcgatatcgttcccgggcatgttcacctgcaggaatttggaaaaatcgtaaaagaagcaatcagggaagcgggcggtgtgccttttgaatttaacacgatcggagtagatgacggaatcgcgatggggcatatcggcatgagatattcgctgccgagccgcgaaatcattgccgattcagttgaaacggtcgtctcggcgcactggtttgacggaatggtctgcattccgaactgcgacaaaattacgccgggaatgctgatggcggctatgcggattaatattccgaccatttttgtcagcggggggccgatggcagccggccgcacaagcgacggccgcaaaatttcgctttcttcagtatttgaaggcgtcggcgcatatcaagccgggaaaatcggtgaaagcgacctgcaggagctggaacagttcggctgcccgacgtgcggatcttgttcgggcatgtttacggcaaactccatgaactgtctgtctgaagcgctcggtctggcgcttccgggcaacggaacaattcttgcaacttcaccggaaagaagagagtttgtgagaaaatcagcggcccaattgatggagaccatcaaaaaagacattaagccgcgcgatatcgtcaccgaaaaagcgattgacaacgcatttgcgttagacatggctctcggcggctcaaccaacacagtgctacatacgcttgcgcttgccaatgaagctggagttgagtactctttagaacgcattaacgaagtggctgaacgagtgcctcacttatcgaaattggcgccggcctcggacgtcttcattgaagatctgcacgaagcgggcggagtctcggcggcccttaatgaattagcgaaaaaagaaggggcgcttcatcttgacgcgctgactgtaacaggccgcacactcggagaaacaattgcgggtcatgaagtaaaggattatgacgtgattcatccgcttgacaatccgtttaccgaaaaaggcggtttggccgtcctgtttgggaatctggctccggacggcgccattataaaaacaggcggggtgcaggacgggattacaagacatgaaggtcccgctgtcgtctttgattcccaggatgccgcgcttgaaggcattataaaccgcaaagtaaaagaaggagatgttgtcattatccgttatgaagggccaaagggcggaccgggcatgccggagatgctcgctccgacgtctcagattgtcggaatggggcttggcccgaaagtggcgcttattacagacggccgtttttcaggagcgtcccgaggcctttcaattgggcacgtatcgcctgaagcggctgaaggtggcccgctcgcattcgtagaaaacggcgaccatgtcatcgttgacatagaaaaacggattttggacgtacaagtgcctgaagaagaatgggaaaaacgcaaggccgaatggaaaggcttcgagccgaaagtaaaaacaggatatctagcccggtattccaaactcgtaacaagcgccaatacaggcggaatcatgaaaatataaaacagaggcctgaacaattgaattccggccccctctatagtatccttgacttcatataaggattttagagggggcttttttatgtcaatggcttatgaagaatatatgcgacagctggtcgtgccgatgcgccgtgagctgacgggtgcgggttttcaggaattaacgactgctgaagaagtagaaagctttatggaacaggcagagggcacgacattggtcgttgtcaactccgtgtgcggctgtgcagccggtcttgcccgtccggctgcgactcaggctgttttacagcatgaaaaagcgcctgatcatacggttaccgtatttgccggtcaagataaagacgcaactgcaaaaatgcgtgaatactttacagggcaggaaccttcctcgccatcaatggcgctgttaaaagggaaaaaggtcgttcattttattccccgtcacgaaatcgaagggcatgacatggaggaaattatgaaaaatttgacggatgccttcgatgcgcactgctgacatgcccgaattccgggcattttctttttggagaaaaagatgatcacaacgagttaccgaccaagcgaatatacgatacacacagcgcagtcgctcagtgtcaagctgggtgagacttactgcagccgcaataaacagcccattgaaaaaatgctggaacgagcggctagcgattttttagtcatcggaaaggaacggttcgaactttacacgaagcaaggggagaagttcttttttcacccgaatacagcgatgttccgcgctaagcggtttttgagaggggaagccgagccgttgttaaaagcagccggattacgcgaaggggattcctttttagattgtacgctcggcctggcatccgatgcgattttggcaagcctggcagtcggaaaaagcggacaagtcatcggcctggagaaaaacaagcttgtctcattgcttgttgaaacaggacttcaaacgtgggaaaccggaatggagcagctccaaaccgccatgaaacgcattcaggtcaaacatgccgactgcgccgattatttgcgggagcttcctgattcatcggtagatgtcatttattttgacccgatgtttcacgaacctgttgaaacgtcagacggcattgcaccgctccgcgcgctggcagaagagggttttaacgaagagtgcatcacgcaagccgtccgcgcggcgaaaaaatgcgtagtgcttaaagaccattggaaaagcccgcggtttgaacgatacggcttcaaggtgctgaaaagaaagacggcgcttttccacttcggtgtcatccatgtaagctcatgatatcatgggcttctttttcgttaatcagtgatttccataacgacaaaataaagcagcgtgagaagtgatactgtcgcaaataaagcgttaatcatctcatcccctcctttttctccttcttattgtaagcggtttatccgctcggtcacagttaccaatttcccatattgcatgataatacgctgccggacatgacgccgcgctttcatctatgctaaaataaatgaaaagaggacaataaaacagaggggaacaatctgtcatgaaattgtggatgaaaaagacccttgtggttctgtttaccattgtaacattcggactcgtgtctcctccggctgctttgatgacagacaagccttcaggacagtcgagcagtcttgagcagaatgattacaccgctttttatgatgaacacgccctgccgggagaagagaaggcagggcgggagcctgaattactgtttcaatcgtatcagcagcagcttctcggtgatgctgaaaatcaatcatttttaaaattcggcagcaaaatttctccggtcattgaagatgattacagaagtgaaattctgccgaaaatcgaagatgtgatcacaggacatttagccaagtttcaagatgatgaagcgtatcaggatgtggttatttccagcaaaccgtcggccggaaaaactgaaaaaatttttcatgtgtataacaggctgacgggtgaagatcttttaaggttccacgtccgccgggatcatcccccgcaagacggctactggtttaattttcattaccataccgctgaagacggatttcagtcacatcatgagctcggcagcatttactgggaccgcaatacgccgcctgactggatgagcgtgtaatagcgagaagaaataaaaaaatcatttctgagaaattttgcagaaatgattttttattgtgttacactactaaaagactactttaaaaggatgaaaaaaaatgaaacaatataaagatttgtgccgtcatgtgttagaaaacggagaaaaaaaaggagaccgtacgggaacgggtacgatcagcacgttcggctaccaaatgcggtttaaccttcaggaaggtttcccgatgcttacgacgaaaaagctccactttaagtccatcgcgcatgagctgctttggtttttaaaaggagatacgaatgtccgctaccttcaggataacggagtccgcatctggaacgaatgggcggatgaaaacggagagctcggaccggtttacggttctcaatggcgttcatggcgcggagcggacggcgagaccatcgatcaaatctcccggctgattcatgacatcaagacaaacccgaattccagacgtttaatcgtcagcgcctggaatgtcggcgaaattgatcatatggcgcttccgccttgccactgcctgtttcagttttatgtcgcggacggaaaactgtcgtgtcagctttatcagcgctcagcggatgtctttctcggcgtgccgtttaatattgcgtcttatgcgcttttaacaatgatgatcgcgcatgtgacggggcttgaaccgggtgagtttgttcatacattcggagacgtccacatttaccaaaaccatgtggagcaggtgaatttgcagctgacaagggatgtccgtccgctgccgaaactgcggtttgcgcgaaatgttgattctatttttgattttacgtttgaagactttatcattgaggattatgacccgcatccgcacataaaaggagctgtcagcgtatgatttcgtttatttttgcgatggatgaaaaccggctgatcggaaaagataacgatctgccttggcaccttcccgatgatctcgcatatttcaaaaaagtgacgacgggccacaccattgtaatggggcggaaaacgtttgaatcaatcggacgcccgcttccgaaccggcgtaacatcgttgtaacctcacgggacgaatcttcattcccgggctgtattatcgctgactcggctgaggaagtgctcaagctgatcccggcagatgaagaatgctttgtgattggcggcgcccagctgtacagtgcgctctttccttatgcggacagactctacatgacaaaaattcaccatgtctttgaaggagaccgtttttttccggaatttaatgaagctgaatgggaattgacatcccgcaaacagggagtaaaagatgaaaaaaacccttacgattatgagtaccttgtatacgagaaaaagaattgagtttaagcagggggacaagaattgattcgttacggctgccttgtgatgtacgttgtatttatgttcatgaaaaatattcaggagtatatcaatcaaaaagagcttgacccgcggctttcttttcaaaaacagatgaggctggtgtatgagcggccgaaagcctttatgagaggctgcattgacgtgtcgggatcggcaatcggcattcatcatgatcagccgctcccggacggccccgtattgtatgtgcatcccagattgcgcccggctgatcttctgctgcttgcgggacatcttgaagagccggctggttttatcgctggcgagaaagctttccggatgccgtttctcggaaattggttgcggctgatgggtgtcatttgtgacggagacagccgggatgccgtgtttcaggaggcagaagtccgtctgcaaaaagggcaaagcctgattctgtccgaagacggcaaaatcaatccggaggaactggcccttcgtttcgatctcccgattgtgcctgtcagcacttcgggaacagaccggctgctgcggggcagattactgaaacggctgaaaccggctgacattgaattacatataaagcccgcttattatccggccggtcagaaacggctccgtgcataaaaaaagcacagtctctatagagaggctgtgctttttatttcagataaaggggactttgacgcaataaaataaaatacagaaaaacatcgaggcgctgccgcctaaaacaaaactgtgccaaatggcgtgatgatacggaacctttctccaaatataaaatattgtgccggcggaatacaataagccgccgaaaagaagaaggccgaaaccggggcctgacagcgaagcgtacagcggtttaatggcgacgatgatcagccagcccatcattaaatagacaagcgttgaaaaaatgataaaccgcttcacgaaaaagattttaaacacgatgcctccgatggcaagcgaccaaacaataattaaaagggtcagaccgagcgcccctttaaggggtcctaataaaaatggcgtatatgttccggctattaatacgtatatcgcggaatgatccacaatttcaagaatgtctttcgtttttttatgctgaatgctgtgcaaaagagtcgagctgagatacagcagcagcattgaagcgccgaagattgaaaagctgacgatgtctgtcggcgagccgtatttcaccgcgaagagaatgagaaaaataagcgccggaatcgacagcaatacaccgattccgtgtgtgacggcatttgcgatttcttcttttattgtgaacaatcaaatgtcctcctttttaaaggatttgtttttgcagtgactgcaaaaagctcaacccttctaatgtaatttttgttccagcgcgtccacggccttttgtcacatagttcatcttttctaagtaatcaagcctgtttctgacctgctggggcgataatgtcattgtgctgttttcgcttaattcggatatgctccgtctgctggcgggttcgccttttgtatttaagtctttaattgattccaaaataaacaaaaactcttctttctccatcaatgtcagccgtttttcttttttcttagttgttttcgctttctggctgtttttgatatacagcgggacatcatcgggataaatcgtgttgccggatgctgccgcggccatatagtgcgccgcattttgaagttctctgatgttgccgttaaaggtgtgccgctcaaacagcggataaacggacggatcgatatgaacatgctgccccgaggctgtcagcatatgctgcagaagaagcggtatatcgctttttcgttcagataaagcagggagcggaaggcataacacgtgaagcctgtaaaataaatcttggctgaacgtattttctgcgccggtatcgccaagatccgccgtgctgcttgcaatgatgcgggcggaaagcccggcgtccagttcggaaagaaggcgggcctgtaccgagagcggcatgtctccgatttcatataagaataatgttccgcggcgggccctgtttaatgcgccttcagcgccgaacagttcatactcaagccgctcttcgctttggctgcagtgaacggtaataaatagttcgctgtttctgcgggatttatgatggatcgctctggccatttgtttttttccggttccgacttcacccgttatgaagaccggcaaatcagataaggcaaattgcgaggccaatcgtttcgcttctgaaaaggtgtgatgttcgccggctagttgataaaaaggatcagtttgttcaattacactcatgaattggctccttttggttctaattggtttaagtataacacgtttatgcgatcgaaaatatctttttctcttgtatcggttcatttaattttatttacaaaattaaaataattgtcttattatttgaatattcatgttataatggcatattaaatagggatttaaataagaaaggactctgtaaatgaaaccgttgcttaaagaagactctctcatccaggtaaaagacattttaaaagcgcaccaaaatgtaaaggacgttgtgatacatacgcctttgcagaggaatgacagactttctgagaggtatggctgcaacatctatttgaaaagggaagacctgcaggtggtcagatcatttaagctcagaggggcttataataaaatgaggcagctctcaaaagagcagactgaaaacggaattgtatgcgcaagtgcgggaaaccatgcgcagggggttgcgttttcatgcaaacacctcggcattcacggcaagatttttatgccgtcaaccacaccgagacagaaagtatcccaagtggaactgttcggaaaagaatttgtagaaatcatattgacgggtgacactttcgatgatgcgtataagagttctgcggaatgctgtgaaaaagaaaaccgcacgtttattcatccgtttgacgatcccgatgtcatggccggacagggaacggctgccatcgaaattttaaatgacattgacgttgaaccgcattttctttttgcaagcgtagggggaggaggactcctgtccgggctcggcacgtacatgaaaaacatctcgccggatacaaaaatcatagcggtagagccgaagggcgcagcctcctattttgaatcgaaaaaagccggacaagtggttgaacttgagaaaattgataaatttgtcgatggggcggccgtaaaaaaaatcggcgccgaaacctttcaaacgctcgaaaccgtcgtcgatgacgttgtgcttgtcccggaaggaaaagtgtgcagcacgattctcgaattatataatcaatgcgccatcgtagcggagccggcgggggcattgtccgtgtcagcacttgatctgtacaaggaagagattaaagggaaaaacgtcatctgcatggtcagcggagggaataacgacatcggcagaatgcaggagatgaaggagcgctccatgatttatgaggggctgcagcattattttatcgttaatttcccgcaaagggcgggagcgcttcgcgaatacctagatgaagtgcttgggcctgatgatgacatcacccggtttgaatacacgaaaaaaaataacaaaagcagcggccccgcattggtcggcattgagctcaagcatcgggaagattacggcgcgctcattgcccggatgaatcaaaaaggatttcattacgtagaggtgaataaagatcaggatctgttccacctgttaatctgactttttttagaacggccgcgcaaaatgacagacacgctttctcagattgtatataataaaaagaaaacaatcgaaaaagaaggattgatatcttgttactcaaaagcctagagttcaaacgacaggacgggattcaggtaaaagtgacagaaataccggttgtcacggaaggtgaacattatttttttcaaattcatcagcaccttgagctttatttgagagaggtttttgcttcacaaagtgtgagaacagtgtattcattccgacaatatgtcaagcgccgtatgaagtggaaagattacgaggccgttttcaaccaagagattttaaaacataacgcctaacggtgcatattccttagcgccttccttttgataagggagggtgcgggaatttttttatgatgaatgctgtaagcgttttatccatggggggaatggaaatgaaaaaaatgaaaatcttcgctgccgtcttttgtttgctgctcttgtgcgcctgcggggggaaaacgataaaagacccgctgaactatcagattgaaccgttttcatatcaaaaccaagatggaaaaacagtgtcactgaaaagcctgaaggggcatgtttggattgccgattttatgtttacaaattgtaattcagtctgtccgccgatgacggcccacatgaccgaactgcaaaaaaaactgaaggctgagaacctggacgtgcggattgtgtcgttcagtgtagatcctgaaaatgatacgccgaaacagctgaaagcatttgcttccaaatatccgctttcgcttcgcaactgggattttctgaccggttacagccaaaaggacattgaagattttgcgctgaacagctttaaatcaatcgtcaaaaagccggagggagaggatcaggtcatacataaaacctctttttatttagtcgggcctgacgggaaggtgcttaaagattatgacggtgtgcagaaagttccgtatgatgacatcatctcagatgtcagagcggctgaggagctcaagtaaactggcagattagacattttcaaatctgaaaaaacatgttacactttccactagtagacggggaaggagcaaccagattgaagctgcgaatgttctcattgatcgccggactggctttgcttttatcagcttgttctgtccagcgcaccggttctgacgctgaagaaccgaaaacgaaagatcatattgtcatagctgcggtcggtgattcattgactgaaggagtaggagatcctgacggttcaggatacgtcggcagggcagcggagtctcttaagaaaaagggacaggtgaaaacggtagatattaaaaattatgcggtgcagggtgacaaaacgtcggacctgctggaaaagcttgataataaaaaagttcagaaatcattaaagagcgccgactatatcttttttaccatcggcggcaatgacttaatgaaggtgctccgccagaatatgatgcagctgacggttcagccgttccaaaaggaagagaaaccttttgaaaaacgattcaaggcgatcgtttcaaaaatccgcaaatataatgaaaacgcagagctggtgtatgtcagcatgtataatccattcacgtttacgctgcctgaattaaaagaaattaatggggttgtaacggattggaacaagatcgccgcaaaagagctggaaaaagatccccacgccgctgcggtgaatgttgaagacttgttcagtcaaaaaagcggcagcagacggatttcaaaggatgatgattttcatccgaacgcaaaagggtatgcactcatcgccgatcgattgtacggcatcattgaaaaacaagggttaccagcagaatagggtgaaatgatgaaaaagtggaaatcgctgttttttgttcttctcgcactcaatgtgattgccgccgcgttaattgtgacattattggttatgccgggagagcaggcgaaaatacaagatcagacaaaaagtgagtacggctttcatatcacgagctcgaaagaatctcttgccaggtttgtgaatgcgtacttaaaagagaaggcatcgaatcagcttgactacaaagtggacatcaataacgatgtgcacgtggcaggtaaaattaaagcattctcaacctccattaacgcggtcgtcacatttgaaccgtccgtacaggagaacggagatgtgatgttgaaagtgacgaagttttccttaggcgaattaagcctgccgatcagctttgtgctgaattatatggacagcttttatgaactcccgtcatttgtgcacgttcattccggggataaaagcatcgagatccgtctgtcggaaatgcctttagacaacggcatgtatgtaaaagcggataaaatcaatctcgacacggatgaaattgaattttcctattatcatccaaaacaataagttttcataaaaaaaacacagatcctttcagggatttgtgttttttcgtgtcagcgttttttgtccagcttgctgaacagtttgattaacgttgcgagctcttcatcagagtagcagtcaaaccgtttaaaaaagtattctgtttttttctggttgaaatgatcgacaattttctccccggcttccgtaatatggattctgataattcgtctgtcctctttggaacggatgcgggtgatccattccttttctactaaagcgtcggtcactgcggtaatgtggcttgcggagacctcaagaatgggggcgaattccgttacttttttaggcccttgttcactgagaatccgcaaaatggtgaattcgttcctggacagctctttatctagaatttcattaacttcatttctgatttgtttaaacacttttcgaagcaaagcttccatatcatacatcatttgtgtccttactttcaaatcatgaacctccaatatgtagtcagcgtggcattcgtttagcttcccctgaaagcagaattatttttattctgtttatacatgctataatataataataccacgtatgaacaaaggagggcacccgtatgtcagaaaaaaaagaaatcgccacatttgcaggcggctgtttttggtgcatggtgaagccgtttgacgaacagcccgggattgaaaaggtggtgtccggctatacaggaggtcatactgagaatccgacttacgaagaagtgtgcagtgaaacgaccggacacagagaagccgttcaaatcacatttcaacctgacatttatccgtatgaaaagcttgtcgagctgttttggcagcagatcgacccgactgatgcaggcggccagtttgcagaccgcggaagttcatatcgggcggcgatatattaccataatgatgaacaaaaacaaatcgctgaagcctcaaaaaaacagcttgaagaaagcggcatatttaaaaagccgatcgtcacagacattttaaaggctgagcctttttatgaagcggaaggctatcatcagcacttttataagaaaaaccctgatcactacgggcgctaccgtgtaggttccggacgtcaaggctttctggatgagcattggagggacagataagatggcttttaataaagaagaaaaaatcaaatcattaaaccgcatgcaatatgaagtcacacaaaataacggaacggagccgccgtttcaaaatgaattctgggatcacaaagaagaggggctgtatgttgatatcgtatcgggaaagcccttgtttacttctctggataaattcgattctcattgcggctggcccagttttacaaaaccgattgaggaagaagaggttgacgaaaaactggacacaagccacgggatgatccggacggaagtgagaagcaaaacagcggattcccacttaggccacgtatttaatgacggtccggggccaagcggtctccgttattgcattaactctgcggcactccggtttattccgaaagacaagctgaaggaagagggctatgaagcctgcctgcatttatttgaaaaatagagctcagcaatgaggcctgcctatcagacaggccttttttctatgtttttttttcttcatgtaatcgttcaataatctttacgattgtgtcttttgtgatgagcggcgcctgatcggattgatatctggggagattgaccttccgaaattccggatgtttggcgggttccggcaatattgcgtaaagattgccccattcatataaagattccgtctcatgcggagaggtcagttcttcatgaagcttctcaccggggcgttttcctacttcaacagcggcggggcgaggcagtccgtgcctgaacgcatattcttcaaatccgtgaagcagttcttcaagcctcagggactccattttaaaaataaatgtttctccgccctttgtaatcgccgcagattgcagggtgagcgttgcggcatcatcaatcgacataaaaaacctcgtcatgtttttatccgtaatggtgagcggaccgcctgccatcaactgctcaaataaaataggaataacggaaccgcgtgaacctagaacattgccgaagcggaccgaacaaaataccgtaccgcggttttgaacatgatgattcgcctgatgaaacagcttttcggacaacagcttcgtagctcccattgtgtttaccggggaaacagctttatcggttttttaagatatgtactgcattttgagggactatcagtgacggtgaggtcgaaaacgaaaaattaaacctcaggataggggtaatttcaaactgagccggaattggtccttttcttttttgtgtcatcgtaacgataacttctttgaagaccattcttaatagcgcgttctttttctctgtgcttgattcaatgtgatattgatcaattatcctatttatgttgtttctgactgtattactgtctatttctgattgcgctttttgagttccattgagctcatgcttggcaatctggagttctttaaattcttcatctaaaacagcttttcttttcaaaaaaagttcatcagtgtaaatgccgctctcatatttctcgaagataaaattctctttgttttttaactcttgttctttttgtgaaagatgttcagacatttgcttttttgttttcacattactatttacgtcttcgtatttagaaatcattgaagtgatatgttttgttaaagtcttattatctaagttgcttaaagaagagaggtaatccaaaatggcattttcaacatcgttatatcttacataagtgcatttattctttttgcaagtgagtgatttaacgtgatacacactttccgtgccgtttttgttttctcgcgttctcctagtttcgtatttagataatggttcaccgcacttagaacaagtgcatacgcctgccaattcacttaattccaatgcatttttattaggcagcagggggactttgtttgcaattttatcttgtgattgttgaaattgttcttgatctattataggggcatgtgcatccgatactacaatttgttccttttcaggtctaattgttcgtttaccgtcttttgttttttccctaaccttatatttaacagttccgatatacgcttcgttttgcagaattgctttaattgtgtattgattccagcgcttttttcctgatggagtcggtatttgtaattttgttaagtgagaagcaatcgctgtataactataatcttttccattcaacccatttaaaaagatgttaaagatgaattgaacgacttttgctttttcttcgactgggactagtttggatgtttttttgtttaaccggtatccataaggcgctagtccggaaatccatttcccttgtgccgcatatgtgtatttagcgcctgtcatacgctctctggtcatttcaaattcttctctggccataaacaattcaaaacgaatctgacgcatgtctgcagggtttcgagggtcataaactttatatggtgtaatgataatcaatcgcttgctttgaagcaggttaacaatttgtcccgcatcactgtagctcccgcggctgagtcttgttatttctttaacagcaattgcctggtacttgccttcctcgaggtctttaagacattctttaaaaacagggcggccctcaatgctttccccagacccgatttccatttttaattcataggggatttcaatcgacttcagtattttattcatgagttctttttgttctgttagcgtatcttcgcctgttcttttttctcgctccatatcctgacgagagcgtctaagataacccaaaatatttgtaatgttgtaagaatgaacgatgttttttaactccaaaaatcagcacctcctctttattgtatttgctgtaaaaacagaagtattcatacaatatgctgtctgacattgaagctgaagcatcctcaccatatggttgtacgcaagagtttgggttcttagttttaggcgtgtcaacaagtaaataacgaacagttttgacttcgcctttatagttaactttaatcgtatccccatcaactgttctgttaagcgttacatcgaccagctttttcttattttcagatttctttttatccgacgaatccttctttgaagcattttcggctttttcattcttgtcattattgcttttgtcgtttgcttgggtgtctgcctttgtctcttttgcattcttttcttcttgctgcgttgttttagctttatctgaatctgttttatctgtagaagcagaatcagacccacacgcagccaaagaaaagcttagagataatgcggcaatacctaacaaccatttcttcattgtaattcccccaaatttgtttgttctgtctctatatcggacaaaccttcctaattataagtgtaaaaccaaatattgtaaatttcattttggcattttaagacactcaaatacagttgtgtggtaaaatttagtgactcaaacaccttagaggagggaaatttaattggaagaaggaaagttaattcgcatgactcttgatgggataaaggaagctgtttctaaatacggaacttttcctatgctccaacatggagggcatgtcatggaagatgctgcttttcaattcagagacccagccagtcctcaagaaattaatagtttagaaaagatgttaggggtaactttgcctaatgattataaagagttcctattcaatcacaatggaatggaaatgtttaatggtattgagcttcttagtacagaagggataattgaatttaatgaagttcaagacttccctaagggatatgtcctaattgggtatcattatgatggcaggtatgttattgatgtaaacaaatcaaataaagggttggggtatatgttgcatctggattcaattgataatattgaagatgcggtatatttagactctaactttgagatatggtttgacatgttggtgtcatcaaatggagctaaatactgggaagtgaagccgaaaatccaagagtattataaatatatttcagaatagaaaatttagataagattaagtgggaacgagacttaaatgaaagtatttgaagcagcctcgttcatttcagccgcagaaaagcgggcaaaacaatacgatcagattagagaacaatttatcaatctcagaaaagcgtttcagggaatggctgacttagacgacagtgagttttcaggcaaaggtgctgataacatcaaagcattctttcaagaccacgccggcgtcacagacagctggcttgatctgatcgatatgaagattgcgtttcttaacagtatttcaggaaaagtaacagatgcgggactggccgattcgtttgtggaagagtcctttttagaacacgagctgtttcatgcgaagaataaatcacaagccatcatgcaggagcagcgcaatgaaatgaaaggtatccttgatgaaatcagtgatatcattcatctagaagttttttccacataagatgtcgatcaaaagctggattcagcagataaaaaaaggaacgataccgtaaataagctcggcaagcttgatcacgatctaacgaaagaatacgcagaaaccgaagcgaacgaacagttcattcaggcagattttcaacagcttcaaaatgcaacgggtaaagggaaaaacgccactccgcttcactataacgccaaggcatacagggaaagtgacatacataagaaaaaaggcgagattgcaagacattcagacacatatttaacgtttaagaaggaagaagcaaaagagcgggaaatcaaggatctgaagaaaaaactcgccgacggtgtgaccgatccggatgaatatttagaaattgcgaagaagatcggctatgaaaaccttgaaccttcccagcagcaatatgtcattcagcttgaacaagcaaaacagatggaagaagccggagaagtgacttgggatattttaaaaggagccggcgttggtttatatgatgtcgggaaagacacggtaaccggtttatggcaactaatcactaaacctgatgaagttgttgaaggtatcataggggcagttgctcatccaattaacacgtataatgccatttcaacagctattgaggaatcgtatcaaaaagatatggtaaatggagatgcttactccagatcaagatgggtgacatatgcgataggtacagtagttacctctgtagtaggcacaaagggagccggttctcttacaaaagctgacgtagcaggaaaagtcacctctaaagtcaataaagcaggccaaaaactgaaagatgtctcaattgctgatttattgccttataatccccgttacgatgttgttccggctggaggagttccttataatgtagttaacagtgaaaatttaaaggatcggttacttagattaattgaatcagcaaatcctagaacggtattaccaaggaataaaggtcgatgggaaggcgcacctggtgacggaaaatggtattccgacatacctgaagtaaaagcagcgactaagggagaaccgattacttttaaagatggacgtcctgattttactccatggactgttgcaaacattaagtttaagactggtgaattaaatggaacgaaaaaagattttaggcttgtttataaaaaaattaaagagatcaagggttttaaatctcaagcgcaggcgaaaaaatggctgtcacaacagggacttaccccacaccatttggatagtgtcacaatacaactagtgcctagtgtgattaataacaaaatacctcatattggaggagcttctgatttaaggggagggtattagaatgagtttcaataaaattgaacaaaagttaaaagaatttacgatagatactgaaacagaacccaacattaatacaaacgagcagctcaaagaaattgaaagaaatataggtaatcaattgccttccgactataaggattttttgaagggatatggaggctgttatttagaaagtaaaaaaacaacagatgaagttgagtacgacgtttgctacaaacctatagagaaagatccttggatgggtaaggaagatgatacacaattactagagagcttctatggtttagctaacgatcataacagtctccaagaagcaatcaatacttattctgatcgctttcctgggaatattattcctatagcaagctcggcaggtggtaatgtaatatgtatggacatcgacaatgaaaaagttttgttttgggatcacgaattaagtcagcctgataaagactttttcctaattgccaattcgtttgaggagtttatcctaagtttagtagacgaaccaattgaaacggatgatagtgacagtgatgtggaaattgagattttagaaaatgactttggaaaattgctctttggtaaggacaattagcttttatttttaggaaaagtattgcaaagttaagctctcagaaagagagcttttttattttcgatagtaactaattataaaaagggagagaggttatggattcgtaccaaataaagaaattaaaacccgaagaatacaataagtgtaataatatttgggacatggaaaagaaaatggctaaggtgttttatgacgaattagtaagcggcaacagaattacttttatttactcagtgaatgacgagtttataggagaaggattgttagtttttcaaaacaatgacccggattataccattccggataaacgcatttatctatctcgtatgattgttaaagaaggatatcgaaatcgtgggataggtggcattattgttgattatttgattgattatgctaaacaactaggatatgagtttgacaggtgatcacaaatcataaaataaaaagcccactcatatgagtagggctaaattaatttttaacctccgactggcctttcagctacctggatgttagatggtgaatctgtactcaattgcgttaaagctaccccacttaaaattacagttaaaatagatacgcaaagcacaatttttttcataagattccctccacctgattcattttctgttcagcccaaattttttcattgaaaaagcttgttgcttcttcaaaagcacctattgattcaaacctttttgcagctatgtaggacaattcatctacactttcaaggtcattttgttgttttaaaaactcaatataacggatgcaattattgaagttgttttttaattcaccgcaatataggttgtataggatgctaattttggcttcgtatatcttattctccattaatatgagtctttcctgtgctttattgtaaaaattaatggctttcattttttcgtcaattttaaatagttccttaattatcatgaataaagaatttatataataatttgaattcatccaagattcatttccaatagctttttcgagagatttaatgcacttatcaggtttgtcccaatcagaatacacgatactaaggttgtgatataactgagcttccaaatattcatcctttgtttcttgtgcaatgtctattgcttctaaataatatgtttctgactcttcaaaccgtttcatatcggaatagtttgcagcagcaatcattgttgaagttgccagtttgcatttataatcagggtgtcgcttatatattgcaattgcattcttgatgtagtgttgtgccacaatgctttgtttaacaagagtgtataagtaggagaccttggagtagaattcagctgcttcaatttcatccggaatttctgcaagctttttctctgctaatccatataagttaattgctcgatcataatttttgttgtatgcctcgtacattgcttcgaataaataaaagttatattccaatttatcgttcgttctttttatgaaattttcattctcttcagtgaaataagtgtgcttttgtaaaggctctccgcgtgaagagtgtagcaacattttgtgtctttcttctaataaactgtaatatgcaagaacttcttgatcctcttccatatcatcgaacaggcttttaatctctgagtaatattttattgactcatgtaccttttgtttctttatagcaatgtaccaatcattcagtgtagtagcaacaacttctgaagcgatcttgctcatccaaacccctctttctgaaaatttcaaaaaccctttgggaataatcataacatagtcattgaaaaaattgtaaaaggatgtagagattttgggattttctaatttgaaaaaacgaaaaaaaataccctcctcgttagagaagggatgtgatcagtttgttgttgcttttaacgaagcaagccactcatctaatgttcctgagaaaccttgttgagctgctaattcatatgctgattttccatctttacctgcagcaccagtagctccagtactgcctttttcaccttttaatgaagctaaccattcaaaagtgatgaatattcaaggcgggagtaagggaaattaacaaaaaaatgtgagggaatgtagatgaaacgatttatcttggttataccgttattggctgctgttattgcctctccaactcaaatgaaagcaagtccaatgccttgtagtgcagtactcgaaccggtaaatcaaaaactgaaaaatgcgaagggtgcggcactaatctataaaatgcagttatacccgccaagtgctgcaagaacgaatatgagtattcttgctgtccaccttcctcagccatcttcttatggaagctacgacggttatgaaggatttgccgccaaaacaggggagatcagttggcgatttaaactatatccaactcccgaggaagagagccctaattgggctggaaggattgattccatatcggctgaaatgacaaatgttaaagtgcaagtacgcctttcaaattctaagacgcaaaagttggggccaagtgtaataacaaacaatattcaatcttgctattagaaatgtagagttcttatcaaagagagcaatgcgactggatcttttgtaaagtgtcaaaaaggtaattgatcgagaaattctggtgaaaaatgaaaaagagcccattaagatgcaatgtctggagtcaattcatcatttgacagaagagagccggcaaaagtcgatattgcgtttgattttgtacatagaaagacggcataaaaagaaatggttagctaaaaaaaggcaaagagtcaacgctctttaccatcaggtgttttccttaagcggtctgcaatatgcttaattaaactcagcgcagcagtcactaatccaataactaaaacaatttcaagtaagaggataaatccaaaatttaaaccgcgactttcaaagtaatcactggtaaaaaagaggaattgataaattccaagcattagcacaataaaggaagcgcctataatcgccagagactttttagagaactccttagtatggttaaaattataaaccaataagaacaaaaatagacaagccatggcgatcttatgagtcaatgaatcacttgctgagaacccttgcacaagtaaggagataattaatccggtcattccgattattttgttcaatatatcacctgctttgtataagtatgaccttagatgtcagcttaccaattaaaggtgatactctcaacataatgcagtttaaagttaacttaaaaatgtgattattttaagaaaggggttgaaatatgctcggttgtcaaaaaggggagcaagtaaggtctttgagaatggagaaatgggaattatattgtggacgacaaatcgaggttctgtaggtgttgaatgggactctggtgaatatggtgaatacaatgataatgtcgatgagctattaatgttagcagattaatatgctttccgaaagttaaacgaaagcagttcattaaaggaagggttagacaatgattaaaataacgttattccaagatgaatattgcaatggtgaatgggttgaaattgataggctattaaatggtttcataagagcagagtcaattaatattgaagtgattgatatcaaatacaattcattaaatactatgcgaactcataatacagctctgcgtatattgagaaaggacttaagatcactaggacgtgaagatgaaatcgtgattttaaacggagtaagaggaagaaatgaaacctatgtagcaaccagggaaactgagtactttaccaatgaatcaattaaagaggtgcattatgctggtgacaataaagaagctgcctttagcaaaattgatggcacttcaggcaacaggctaattttagatgtttgttttgatggcttgaggattaaatcttttatcaaaattcataatggtgagcttttgataaattgggcagcacaaagaaagaggttgaagactacaatgccaaactaattgcggcacaatttctttgaaatgttggagagagctgaacaagtctagataaaagaagaaggattttatcactggcttgttttttgtgtaggagccttgaatcttcgattgtattatcaatatatcatatttttacaaataatccatttctgtcttaagatagtttttaatgaatacaaaaagccccacgaatggagctgctaaattacgttttattgaacatagccagaaaagtcgctcggagcagagaaagatagatagtaaagcgcattggcatctagattttttattgttcctgtagctgtaccgttagcatttacagttagtgtttcagtagcaaaaatccagtcggaatcattccaaactttcacagttagtttagttccaatattgtttgtaattgaatagcttatcgaagattttccttgaaaataactgtttgaatataatgtattgccagttgcttgtccagcgaatgtcaatttgtttttcgtaagatttacaatgctatttgaattaggagggttaagaccaaaagctttaaattcaccttcggcagagctagtaagcttagttgaaaacctagaattgccggtctcagcagatgcggcagtggcaaagctcagagaaagaatggccaccatggtgcaaacaataaaactaaacaactttttcaaattaaacactcctttatttgtaaattcaagtaaataataacacttaattttaggaggtcaataggtttattcaaactggaatgaatctgtcacaaaatatgaagagcattttggtcaaggataacttattatattatgtactaaattttcagttcattttaaggggctaagcattaaggagttatgtaacggagagattatactctccaagattcaaaggaatgtgtgcggagtttaccatgtagtcttaaatctataatcactttcagccagctataagaatgtttattaatctcatggggcttttttaatacgattccttcaagatgcttttctttggcagattaaagtaagctagcgtcccattacagtctcaaaatcaggaacaccaccttgggctgcaaaaacaacagtaccattgagcatatcaagattcgagagttctgggaacttgcttgttactttattgttgtgacgaagtataaagctggaaggttcagtgtgagctttaggagctgaatttcttagagaaagcactgtatgaagagggattttaattaaataaagcagacattaagcctgctttatctttttgaacattattccttttttatatgcattatgttctcaccaaatgcccgtccttaagattttaaattctgggcacgatcagactttttagggaaaatacattctaacaaaagaaaaaataaagttaatcctaatgataatttaaaattgtcgctgttcccaattgaacataagatacccactatataaatgaataaaaacctaaacaatgaggcaaatataaacttgaagaagttatccccaatgagatgccttccaacagccaaaaaaatattatcaaaagtaaaagaataaacaaccatacacacacttgttataacaatctgtttaaattctatttctaattcaaagaagcttacaagcacatttgctgatcctgttgcaaataagattatcactattatgactgcagtaggaatgagtgataaaaccaaagctcctattactgtagataataaaaatttttcatttgtgtttttttctgcagcttctttcttttctcctctgtacataaaaataaaaaagacgatgagagataaaagataaattgataacgtcataacaagcagattcatggtgatctctccttacctaattaaaacaaaagagtgaaggttgtaagcctcactctcttgtttttaatgtatagttataccaaaaagaatacaacaaccttcgcaattaactgtgcatcagctaatggaattccggctttcactaaggccacagtaacagctgtttctccgaaatttgtaagttcatctataacgtccgccgctttgtgtccccacttagaacaagcatcaccagctttttgagcccatttatatgggatctttttaataaggtttcctaaagcgggaccgccaaccctaagtgcttttactaatatttgtttagcgaaaggaatgccctgtgtatgtacttcagaatttgaagctaaaggagcctgtacgctattttgaactacaggtgcttttttactttctgctgcacttgcatagccaggagaaacaactgatatagtcagcacagccaacgtgaacaccatgataaatgaaataggttttttcttcattaaaattttcagttataaaagaaggaacaagaattttaaaaacatacttttgttattatacgagacacaacttttttaaaaaagaaccgaaagtctcactggggatgcccattttatgccgtggagaagattcaataaaactgtaattttaacaaaaacaaatattttcagggtaacgtctgagtgttaaaacactcagaggggggaattaggtttgagaaacaccattggcaagattggaattttactggagtggtttgctttatgattttgggcaggagttaatgcgaaagagctaactcagactaggaatgatactgaaagcaacatctacctttaatcaatcagtcaatatacttaacttaaaaccgcctcaaatattaagaccctaagttactcgacaactgcagatgattgggaggatgccggaactacatacgggataccaaatttgaaaagtactcaacggccgctgtcgttcaaacataggatttgcttttaaatttgcctacagggggttggtcatcttatttagctggattagctaaaatgatcattctaggtgaatgtaaattgtttactttaaggataggcaggaatttaagatggcaggggcaactttaatgacaaaacaccttgtaacgattgatgaagataaggatcgaaagaaaaaatcgggagtgacagctttatcatctcaaactaaggcggcccaaaagttgctgcaatgtgataaaaaataatcctgccttaggtgggaggattattacatgctgtttattaagctgtaaacaaacgcaacaataaatagtggataagagataatagcaattagttttgaagatttgctctttttttcaaatgtgtatatcagtgcaaatcctaaaaagaatattgtgacaaaccaagaagaataggacgggtacaatgcaataagtaagacaataagagtggataacgcaaaagaagagtttagtgttattttctgatcgtttttcaaataaaccgcctccttacacatattccccccatataaaaacacttaaacattatattaagtcagcatgattaaatgataaacattttaagtaaagaacaagataaagcaatccggcatttcaaggacaagctgaacatgtctgaaaaactgtaaatacccttagttaatgtaaactgcttagagataagcaaaatgattaagcggaggagctgtatagacttataagaccttatataaacattagatcgcttaaagaaggtgatgtggttgatcagccaattgaatatttcatgatgcaattgtacggttctataatggtgaagacctcgccgtgttccatttgtctagggggaattggtttaaattcataaacatgaggcgttttagtctgtcatttcctaaaacagtgttttattcttgttacaaatatgcaagaagggcggtttgaacttgtataaagtgtttataatgctgttaattttgttatgtataacattagggtgtcaaaaccaacataacaaacattttatggaggctgagcaaactatggtcggctatgtcatcttaaaaagagagaatcaagcaattctcatacctaatgagaaagctgatgttaaagactataaaaatcttagtgaaaaagaaattattgagaagtatagatcggatatagttatactgggacttagtcaacttaacaataaagatgacttgagcaaaggacaaaaaatacgtatttggtataaaaaattaaatgaatcttcacctccaaaaacaaacatctcaaagtttgaaagtatttagtaccatattctgtaattcctcggaatgccgctgcaaaactgaagcggcatattgaacagaaataatgtcttcaaaccttacctcattcgcggtggcttaatcctgccccaagatttatttgacgattgttgactcaggtgcagagaaggcacatgccaagaacacatttttgaattactgggcaccttgaataaaaccagcattcccgtattcatatgagaagagatcggtactgaacgctggataaagaaaaaagttaaccgtacatttgaacaagcttgcgaggttttgataaagaaagaacagtcaagagacgaaccattacatacatataatactcctgtgaaagcgggggtgtagttttggaaccttaccaacgttatgaggaattgaagaagaaaacaataaaggttgtccataaagataattacagtatccgctatatagaacaggatgaagccagtgatgacttagatgaattttataaacaatttgctcaacatttattggaagctgctttggaaagaactgcagagtaagcttctttttttaattggttagtagtaagtatcttaataaacggctttatcggtactgatattaatcacatgcgtcacctcttgcagcaaagcggcttctgcgacattttgtccgccgataaggttggtttgaatggcttcaaagggattatcctcacatgtcggaacctgcttcagcgcagctgtgtgaaagacaatatcaacacctttcatcacttggttgactcttctgtagtcacgaacatcgccgagcacaaatgacagtctttgttcatccgcgtatttttgtttcatcacatattgtttgctgtcatctttgctgaacacaatgacttctttaggggttaagagcaaaaggcgttttactatttggcttccgattgatcctgtcccgcctgtgacgagaacagttttatcgtgaaaaaacggttgtagctctactgcttgctgtttaggcatggcttatcctccaactctcgtttctctaccatgcatcatatgttgaacaatttcagcgagttaatgaaagaaaccaataaatcaaaaattagagaaaaacattaatctgatgcgcttttatatcgctttacctggttaatagaatagaaatcacaaataaaacattgtactaaatgttcatcttaaatatttgctcatgtcaattctttctcttcataaattctcacatgcggacaatcttcacaaaaacttaacactgaacttcctgtatgtattttacaattaaagtgcacgttcataaaaggaggaaggaaaatgaatcattcaaaaacacttttgttaaccgcggcagccggattgatgctcacatgcggtgcggtttcttcccaggccaaacataagctgtctgatccttatcattttaccgtgaatgcggcggcggaaacggagccggttgatacagccggtgatgcagctgatgatcctgcgatttggctggaccccaagaatcctcagaacagcaaattgatcacaaccaataaaaaatcaggcttagtcgtgtacagcctagagggaaaggtgcttcattcctatcctaccgggaagctgaacaatgttgatatccgctatgattttccgttgaacggaaaaaaagttgatattgcggcggcatccaatcggtctgaaggaaagaataccattgagatttacgccatcgacggaaaaaacggcacattacaaagcattacggatccagaccgcccgattgcgtcagcaattgatgaagtatacggtttcagcttgtaccacagtcaaaaaacaggaaaatattacgcgatggtgacagggaaagaaggcgaatttgaacaatacgaattaaatgctgataaaaatggatacatatccggcaaaaaggtaagggcgtttaaaatgaattctcagacagaaggaatggcagcagacgatgaatacggcagtctttatatcgcagaagaagatgaggccatctggaagttcagcgctgagccggacggcggcagtaacggaacggttatcgatcgtgccgacggcaggcatttaacccctgatattgaaggactgacgatttactacgctgctgacgggaaaggttatttgcttgcatcaagccagggtaacagcagctacgcgatttatgaaagacagggacagaacaaatatgttgcggactttcagataacagacgggcctgagacagacggcacaagcgatacagacggcattgacgttctgggtttcgggctgggaactgaatatccgttcggcctttttgtcgcacaggacggagaaaatatagatcacggccaaaaggccaatcaaaattttaaaatggtgccttgggaaagaatcgctgataaaatcggctttcacccgcaggtcactaaacaggttgacccgagaaaactgactgacagaagcggaaaataaacatgaaaaaagcagcttatccaagctgctttttgatgtgaagagcgtttcatgagaaagtcttggaacggatagccgcaagcacagccggaagctggtcatacgtgtacgccggtactgtctcttgataattaagcgccgcgatttgttcacgttcacccgggtttgtcatataaaaatggattttatccgcaaaatccgcaagcccgctgtaagaaacaaaggatgaaaacgggggcgcgggagaaaggtctgtcagctgaaaggcctgacaagccgcaatgtctaagcttctcgtatttaaactgatattttcgatgccgcgtccgttctgattgagcgcaaaccgataagaacggtgagggtttaagaccacgtctgcgctgttgtaatataatgcggcacgttcgggtgcaatccattcatccattacgagcacattttgctgcctggcgatttttttaggcagatgtctgcgccatcccttcccgataatacgaagcgtatacggaagcttcgccgctgctttcaccagttcaacgcggttcgggtacgggtatccgatcagaagcagatttgtgtgaagagaagattcagcaggttgtttcttaaaaagccgctgattaacggggatcgggacataatatacgtgctgtaagcccatttgccggtaagcatcaagcgcgttttgttctatcgttaaaacgacatcggcgaaaggggcgattgtcatgctcacatcgaaataaaaaggatcttccgtcatccatagataaacgggaatctgttctgtcttcagccattgaagccattcagacggaatacggtctcccgtcatcatcagactgatgtctggtttgaatgcccgtatactgcggatggtatcttcctcaaactcagaaacagaaaaaaagcggacggaagactgtaaaaagccttcctcgatccagcggtcaaaatacgtgtatatgcctttatatcctgaacggatatataaaacgttcatatgctgttacgaagtgaacgtgacactttcaactttgtcgacgtcaagcaatgttgtagcagagcctgccggtgtaacggaattttcctgcgtaacaaaaacgattccgtgaatttcgtcaaaggccacaaattgaaccgggccgatcatgtctcctgaatccatcacaatgctgatgacagtgccgggctgaattcttgcaaaaatccatctcgccgctaatgaaataccgcttcccaatacagattgtgcgctgagactgtctttcaccgctgcttcatctacttttgcatcaattgccgcttccaataattcttttacgctgtttttcacgttatctcctccatctgtaccgctagataaagcgctgttgtcaaatacaggggctaaaagagttttcaataagttctttttaagctccaaacgatcttcgctcatgcggacatacacctcctttaacaatttcaacctcacgtttattcatattcctgattgaagagattggtataagtcgaatgccgttttgcttgtgtttttttcaatatttaatcaaacagctgaattttcgaatcaggctttgtttgcctatgcggtttgtaagagtatgacatacgttgtatagattaaaaaatgaaggagaggaatactttggattcagaagaaactgtaaaacacgggggttttgaggaggaatttcagctcgtactgcttcttcttcttttgttatcccgtcagccgtccgaagatcattcagatttgcggcgtcagcttgtaatggcaaaagagcttggggttcctgtatcacgcgtcaatctgattaacggcagcacactgcaaaacgtaatagtcaaagaagtgctgtcagatttggccgtttttcaaaatccgctcaatcatacgagatcaaacgtcgcgatttcaagcatcgtcagctggggtgctttttaataacggatatcaggctctgtctctttcggagccgttttttatgttttacagaaggggtgatgggatggaaaagaagatctcaattatcttaacgagttacaacaaaccggatcttgtgaaacaggcgattgaaagtgttttgcatcagacctacagcaattgggagctgtttgtgatggatgatcattcaaatgaagaaacctcggctgccatcagtacgtatataaaagatcctcgcatatattatgacaacagttttatcaatcctgccgaacggctgaagtcgacccggtatgccgttttgattaatgatgcgctttcacgggctaaaggcgaatacatcacttatttgacagacgacaccgtatttcatccggataggctcagccgcatggcggaagcgcttaatcaatacagcgagtttgatgccgtctattccagccagaaggtgatacatgtaaacgggcgcggaacagaacaattccacttctatcgttttgctgaagaggtgcttgatcaggccgcttttctcgttgatcactgttcagtgatgcaccggagatcattgcttgagcgtgtgaaagagaagttcggcagcttttgggacgaagatgttatgcattggaatcacggagactctgttttttggagcaggctcaacacatttacatcatttctgccgataaaagaagtgttggatacgacctataaaacaccccactcatttcagaacacgtatcaatcgcttccgtctgtcctgatcgacggatcctttgtaaaggggacggatcagaaagtatatcagcttgaccgaaataaaaggaagcctgtaaacgagcgctggcatacgttatatgaaggccgaaccgtcgtcattccggatccgtttttatttcaatatgaggaagagaactccgtcagtattccgaattttcagctggtcagggatcagtttcatgtttattttatagaagacggggagaaaagactggttgatcatagcgcatttcgcttttaccgatttaaacggcatgacatcccggctttagaacgggacgaaatacaagcgcttccggacggtccgccgatcacccgggggacatcgggctgtattcaacatctgcccgggagaatgctgttgcgcattgaacgggaattttatgtttatttgagaggggttctccatccgatcagtcatgacgtagcgaaacgtttttttgcgaatcagaaggcgatacccatttcctttcagcaaattaaacaattaccaattggaatgccgttctatccggtgtacgatgaaattatgagaaatctcaatataacaaaaggttgagagatgcagttggatgtgtaaggaaaaggagagcttttatgaccgatcaatttgataaaaccgagaagcagtatatagagctaacttccggcattcagaggttcgagcatttcagtgtatatacggacccttttttgccgcagattttttcgcataactttgttcagctgcaccgtacatttccgttagacaaactgctgccgtttttttcgtccgttccgggcttgcttcaagccaattatattcatgtgaaagcggctccggagcacgcgtttccgcttcttctgaaacaaaatctcgtaaagcagggctgcgtagtggaagatgagctgttttttgcaaggaaactggaaaatggggacctgcaggcgggacacccgctcactgcttgggggacggaaaaaagcctcgccgacgggtcgtctattatgaacatctatgacgccctttacattggcgaggcggcggccgaacaaaagcttgagcggaaatatcctttgtataaggacggaacggtcatgcttgttgtatgctacagcgacgcctcgcaaacgattccgatcggctgcggagagcttttcatcaacaaagcagataaaaccgcaaaaatagaagaagtcgcaattctggaccaattccaacgaaaaggctacggatcgatattgatgaatgagctgatggcggcggcaaagctgaacggcatggaaaccgtataccttgtgacgtccgggatggacggtgtaaaccgcttttatgaaaaactcggcttcaaaagatttcggcgcgtgcatacaatttttcattattttcttacatagttgggcattcgcataaaccaattgggagttggcccgcatacaatgccgtatatcgtaagaagaaaggatgatttgcgtatgtacggatacggatatggctacggttgcggcagttttggctatggttacggacacggcggctgcggaggcggaaccagcacttttgtgctgatcgtggtattgtttattttattaatcatcgtcggtgcggcttttatttgttagactgaaaaaaatcctataatgaaaatcagcctgcagagaacatcactttctgcaggctttttgttatatccatgctgaaaaatcagcttgaaaaacattttaatacatattacctttctggagaagggggcgaaaatgtgaacataacgattgaagaattacctgaatccagaattgcttatttccgaaacgtcggagagtatggcggaaagcaaaacaaagaactgatggagtcatttaaaaactgggcgcaattgaatggtctgcttgatcattctgtcattttaggaattccgcaagatcatccgaatcgtactcctaaagagaaatgccgctatgatgtttgtcttgttatcaatcaagaccatgtgcctgaaccagcccggatcggtacattttccggaggtaagtacgctgttttcttgcttgatcatacaaaagaggcagtcagtggattttggaacactgttttttctgagatcgaaaaaaataatttatcaatcagagaacagcccattatcgaaaggtatactttacaaaaggtgaatcatcatttgtgtgaaatattgattcccatacagtaaagaagacgggaattttccgccttctgcttatctgattcagaccaaaaatgatgtgatgatgagctgagcaaagaataaaatcaacaataggaatagaatttccagaacgctcttcaggctgtcgggacatttccggcagcctgttttacagaaaggcattttctgcaaaaaactttctgaaggataagaatgcggttattcatctgttcatacaatgaagcaaatgggttttcgaggtggaaagatatggggagctatttaatcaaaccggagcttgacgcaaattatccgtcagtcagtcatggaaagggatcatatgtgtatgatcaggaggggaacaagtatcttgacggagcatcgggggcggtcacttgcaatatcggccacggcacggaggatattatacaagctttaaaagagcagcttgactctgtttcgtttgtgtatcgctcgcaattcaccagtactccggcagaagaactggctttatttctgggggatcatctgccgggcgggctgaattggtcattttttgtaaacagcggctcagaggcagtcgaaacagcgatgaaaatggccgttcaatattggcaggaaaaagggcaataccaaaaatccgtcttcttatcaagatggggcagttaccacggcattactttgggagcgctttcattatcggggttctacgaacggagataccgcttcacccagttgatcgaacggtttcctgccgtttcagcgcctaatatgtatcgttcagagctgcagggagaggaatttgtgaaagctgcggcggctgaactggaaacggctgttcaacggatcggttcctcatttatcgcgggatttgtcgcagaaccgattgtcggagcagccggggcggccatcactccgccggcaggttattatgaagcgcttgaggaggtctgccgccggcacggtattttgtttatcgcggatgaagtcatgacggggctcgggagaacagggcggatgcttgcttctgagcattgggggatcgcacctgatatcgcggtgctcggaaaagggttaggcgccggttacgctccgatagcggcagctgttgcgtctgatgacatcattgaaacgatcaagcggggctccggggtcattatgagcggacatacgtacagtgccaacccatactgtgctagagcggcgcttgaagtgcttcgctatgttaagaaacacgagctgcttcggcagtcagaggagaaaggcgtaatgctgaagcggaaattagaagaaatcaaagagcgcagcggggtgattggggatgtccgcggtaaaggcctcctgatcggggttgaattcgttaaggataaaacgacgaaggacgttttttcgaaaaaacaggccttcaccgaaaaaatcattaaagcggcaaaaaaacggggcctgcttatttaccctgcaaagcccggtattgacagcggagaaggagacgccgtcatcatcgccccgccgttcacgatttcatatgccgagctggatgagctgtcagatctattttcacaggccgcagaagaagttgaaaaaatgatgaagaaggattgagctgatatgtctatttttcataaaaaaatcgatattcatgaagcaattgccgatgtcaaggacgaatctgtcattatgttcggcggttttgggggagtgggttcacctccgtcattaatcgaagcgattttggaaagcggcgttaaagagctgaccgtcatctgcaatgatgccggatttccggaaatcggcatcggcccgcttatcgttcataagcgggtaaaaaggctgatcgcttcccatatcggctcaaatcctgtcgcgggcagacaaatgactgacggagcgcttgaggtggaattttcgccgcaagggacgcttgctgaacggattcgcgcaggcggagcggggctaggcggtattttaactgatatcggcattgataacgcaaccgtttgtgaaaacaaagaaaccgtaacgattgacggaaagtcctatttagttgaaaaagcgctgacggctgatttcgcttttgtgtccgcacatactgctgatgaattcgggaatctgacgtttgacaaaacggcgcgcaacatgaaccctctgatggctgcggcggccgaaagaacatttgctgaggcggcagagattgtgcctgccggcgaacttgacagcgagcatattgtaacgccgggcgttttcgtggagggtgtcgtgcaaagtgaaggagtgaagtggaaatgggcttgggaatagcggaaagagagagtatcgcgaggcgggccgccagtgaagttacctcaggtatgattgtcaacctggggatcggcattccttctttagtgccgaactttctgccggccggcatagaggtcatgctgcaggcggaaaacggcgtcctcgggatcggcggcagtccggagcgtggagaggaggatgagcttttatgcaatgcggccggatttcctgtcagtacagttaagggagcttcctattttgattcagctctgtcttttgccatgatcagaaaagggctgatagatattaccattttaggcgcgctccaagtcagcaggacaggtgatctcgccaattggctcgtgccggggaaaaaagtgcctggaatgggcggggcgatggagcttgcccaaggcgcgaaaaaagtggttgtcgtcatgagccacaccgatcagaaaggccggccgaagctggtcgaaagctgttcattgccgcttacagcagcgggctgtgcagatctcatcattacagagaaagccgtcatcagcatagatgagggggcttttgttcttgaggaactgctgaatggcacgaccatagacgatgtcattcaaacaacggatgccgaaatcagattgggagaatgttttcttaaaagggggcctgtccatggatcaattagaaaagaaagtcactgagtgggcggaagaaaacacagcaaaagcggtaagcttgctgaaacggctgatcggggaaaaaagcacgttcggccatgaatttaacgcacaggcagtcgttttagaaaaactgagacagtttgacatggatattgatgtatgggagccgagtgtcaaacatttgaaagagcatccttattttgtatcggaacgcgaagacttccatgaaagcccgaatatcacagctgtaaagaaaggggccgggggcggaagatcactgatactgaacggacatattgatgttgtcccggaaggaaatcccgccgcatggacgtatgaaccgtttaccgctgttgaaaaggacggcaaagtttacggccgcggttcaacggatatgaagggcggcaatacagccctcttgtttgcgttagaagcgcttgaagcctgcgggattacgttaaaaggagatgttctgtttcaaagtgtcgtagatgaagagtgcggcggcgcgggaacgctgtcggctgttatgaggggctacaaggctgacggggcgcttattccggaaccgactaatttaaagctgtttgttaagcagcaagggtctatgtggttccgcattacggtaagaggattgtccgcacacggcggcacccgctatgaaggggtgagcgccattgaaaaaagcctgcatgtcatcacagcccttaaagagcttgaacacgtccgcaacgcccgtatcacagacccgctttatcgggacgttccgattccggttcccattaatatcggcaccgtccaagggggaacgtggccatcatcggtagctgaccgtgtggtgatagaaggcaggtgcggaatagcgccggatgaaacgcccgaagcagtaaaagaagagctggcaagctggctgaaagatttggagtaccgggatgaatggtttaaacaccaccccgcggaaatagaatggtttggggctcagtggcttccgaatgatctcccggatgagcatccgctgatttccgctctggaatcttcttttgagaaaatgaaaggggcaaaaccggttcgtgaagcgtccccgtggggaacggacggagggcttttgcagcacgcgggacagacgccggtcatcgtcttcgggccgggagaagtcaaagcggcgcatcaggcgaatgaatacattgaaatccgggcgttaatcgatgccgtcaaaatcatttctctttttatcatggaatggtgcggggtggcagatgggggtgacggagctgataaaggaactgagggctgaaaagggagcggccgagattgatgcagaccgtttcaatgagcggctcagagtcattcgttatgacggacagatcacggcgcttattccggccgttttggcagaagcaaagcaagaaggagcccaaaaggtaattttctttgccaagcgcggcgatgagccggaatttgtcaagcatctttttattgttgagggtgtcatagacgggtattacaacgggcatgaggctgttgtgatggtgcgctatttatcagaggaacggagacggtcagattcatatgtatcagaagattcgactgttgaccgtttatatgagacaccgcggcggggactgactcagacagaaagcacgctgatgttcagaaaagcggccgaagatgatgcagaccgtttaacgcacttatataaacatgtttttcttacctatccgactcctgtctttaatcccctttatattaaaaaaacaatgagagaaaacaccatctattatgccgcattcgatcaggatcgtctcattggggcggcaagcgcagatatcaatccggtattggggcacgctgaaatgaccgattgcgcggttctgtcagattacagggggaactccgtaacggcacacttgtttaaagcgttggagcaggaactcgcgggccggggaatcatccatcttttttccttggcccgtgcagcgtcttacgggatgaatgctgttttgtatcatgccggatacggctacagaggcaggcttgtgaacaactgccgcatttcagaagggctcgaaaatatgaatatatggtgcaagactttacgtttggccattcataaggaggaattcgtttgacaaacaaatggtttcagccgaagcgtcattggaaggagattgaattgtggaaagatgtgccggaagacaagtggaatgattggctgtggcagctcacccatactgtaagaaccgtcgatgatctgaaaaaagtcattcatttgaccgaagaggaagaagaaggcgtcaggatgtctgtaaaaaccattcccctgaacattacgccttattatgcttctttaatggatcccgataacccgagatgtccgatccgcatgcagtccgtgccgctgtcagaagaaatgcacaaaacgaaatatgaccttgaagatccgctgtttgaagatgaagattcaccggttcccggtcttacgcaccgctatcccgaccgcgttctttttctagtgacaaatcaatgctcgatgtattgccgatattgcacaagaaggcgtttttccggacagatcggaatgggggtgccgaaaaaacagcttgatgcggccatcgcttacatccgggaaacgccggaaatccgtgactgcctgatttccggcggagacgggcttttaatcaacgatcagattctggaatatattttaaaaaacctgcgtgacattccccaccttgaaattatccggatcggaacgagagcacccgtcgtatttccgcagcggataacggataacctttgtcagattttgaaaaagtatcatccggtctggctgaacactcattttaatacgagcatcgaactgacggaagaatcggttgcggcgtgtgaaaagctcgttaacgcaggtgttccggtcggtaaccaggccgttattttagcaggcattaacgattcggtgccgattatgaaaaaactcatgcatgatttagtgaaaatccgcgtgcgtccgtattatatttatcaatgtgatttgtcagaggggatcggccatttcagagcgcctgtgtcgaaagggctggaaatcattgaaggactgagaggccacacaacgggctttgccgtgccgacctttgtcgtcgacgccccgggcggaggcggtaaaatcgccctgcagccgaactacttgctctcccaaagtccggagaaagttgtgatcagaaacttcgaaggggtgattacatcttatcccgagccggaaaactatatcccgaatcaagccgacgactattttgaatctgtttttccgggaacgatggccaaacgcgagccggtcggactgagcgccattttcgcggacaaagaggtttcgttcacaccggaaaatgtatcgaggatcgacagaaggaaaacgtttacatccaaccctgatcatgaaacgctgaaagaccgcagggaaaaaagagatgaattgaaagaaaagaaatttattgcacagcaaaagaaagagcaaaaagcaggatcggaagtcggaggtgagtcgccgtgaagccatgcgagtggtgcggcaatcagaaggcgtcagcttgtcaggcggctgtgtactgggagcttcctgacggtacgagggccatagaaattacagaaacacccgcattcgcctgttcctcctgcggcatgacttatcaggaggaagcggtcatagcggaaatcgaaaatcagctttttttagtcaatgcaaaaaaattaccggaaacactcacatatcaagagctgatggggacagaacggatcttgaaacggaattattttgacttctcctagtcttcttttgttgtaatttcacacttgaaatgtataatagtacaacaaaagacagtcatcaggaggggaaacccatgaaatccttttatcactatttgatgaaatacaggcatcccaagccgcaggacgcaatcagccagtttgcgaatcaggcatacgaagatcacggctttccgaaaacgtcaagcgattatcacgagctcagttcttatttagaactgagcgccgactatttagaaacgatggcgacatttgatgaagcttgggaaaaatatgagaccgaggtgcatcacgcctgacgaaaaaccgcacattgtgcggttttttttctgttgaaatcactcgcttatgaggtgctgtatgatcaaatcccgcaacgccgtccgttttgatcagcacgtaaacacatcttcctgacggcacgtatcataaggcagtagaatgtatagctgcagagttcaccggatcaggcctgctgacggcggggtcctgggtaaggagcctcttttcacggagaaataatcaaacatttaaatgaagtgaggggaatcaaatgatccattaggtaagactgatgaggcactgacgtttggacggaataggggattttatgtgacaaggttgaagcggattgaagttgtggcttcattgaaagccgaaacgagtttgattgtttatgataaacaagccattgcaaatatgcagccggaattggatctccttacatcttcgatgatgtgtttcacggcaaatcttgaacatcacggcggtgatattgtcaacatgccttcgggccgggtatttacctttgcgtcatagagaaaaaaacaaagactcataaaaatagaagctttttgtctcagcattgttactgctcactgctcagtcgatagagagcggaatgtcatcaggcgcttctgttacggtaagtgaaaaaacgcacaagcatgttgcggtttttgccattttgaacaggtgcagaaatagatatttcctgtggttttcatgcccatgcgaaatgatggcggccggcatacgatagcgtatgacagtccgcggcaagggggagacagcatgaagccagataaaccgaaatttcaagtgggagacatcgtggtcgtcgtgatgtacggaaccgtcggcaccattacgaaggttcatcaaattgataaacattatctttacgaagtcaatcataatgaagtgctttattttgaatcgtccatccagctttataaagattatgagggcgtgatcgtcgatatggagaaattggatattgaatatgaatttctgatcggcgacgtcgtatatgtaaaggactacggaaaggaattattccgtgtcatcggccacagaactgaaatatggagatatttagaggatggctgggaggatattatttatgagctgactcggctgaaagacggagagtggcttgaaacggaggaagaggatctcacgctggttctgagaaaatatgaaatggatcagtttgtgcatcagctgctgtttgtccactatgttggagaagcatctcatgagatcggcgaggataccgtcgcgtctgctcttcttcagtttgaaggcgatgctgatgatcccgataccctgcatgtgctggcggtatcgattgtagatgagctgcttgatatttataacgattataagattctttatcatttgttcggtgacgaagaatataaagatatgatgaattttgtgctggaaagcctgcgggagcatttcagctagccggcaaaaaaacggacggtgacatataaaaaccagggcagacagccggcaaagatgacaaacgacattcctttcagcactttttccaatacgatatcaaatccatctccgtccaataaagccatcattttcgtcatcatcttttctccctccggggcttgtttttaaaagtatatgagcggacaaaacgtttagaactttcgggtataatttgaacggttttttcataaaacataaaaaaggaggcggtgtttgcatgaaagaaatagatcttgtgattgacacagaagaaatagctgattatttttacagtcagcttgctatgcgcgggtacataccgagtgaagaggaaatcttcgaaatagccgacatcacctttgattatttattagaaaaatgtatgatagacgaagagcttgatgaagactgaaactgcggaaccgaagtgaaaaagcttcggttttttcaatcagctcgggagaatgaaacatggggggaaaacgttgtacaagccagcaagtcttttcgcattgtttattctgctcgcagcagcgatccggatagaagccgtccgggtttttgatgagcgtgtcatagaagcggctgtcaggatcagggctgcctggctgaatgaattgatgttatggataacggagctcggcacgaccgcggtgcttttgccgcttcttcttttgacaggcgcggctctgtatatgtacaaaaaaacgccggatgttgtttttttgccgcttctctttctcattgaacggattgtaaacataaaaataaaagaattgattgaaagagccagacccgcttttgaaccgctcgtccatgaaacctcatacagttttccgagcggccactccatgaattcggcagttatgtatcccgtcatcgcttactttttgatcaagcatgttccgtttttcacgaaaagaaaacgggccgtcaccgtctttaccggagttctcgtcattctgatcggattcagcagaatttatttgggcgcgcattttccgacggatgtccttgccggattcagtctcggactttgcctcgttgcgctttttgcgctctttgacgaaaagtatcatccgtttcgacaaaaatagagacaggagaaatgagaaaaaacgctaatactattaagaaataagagggagggatcttgatgctgttatcgctgcccgtgtttaaaaaaaagacttgcgcctatgatgtgacgatttttcaaacaccccgctacggcgagaaaaagggatacagggtcgtctatcggacagagctggccgctgacaatcatcaagacgcactggaaagggcattttctgtttttaatgtgcctgatacggtcccaaacgactatcaagccagattcatagcgaccggagatgtcatactcatagacgaaggaagaaaaggaaagacctattacaggcttaaccctgcgggatggagcaaaattaaccggctgctcgtccagccgaggtaagatggggccggctgaatcttcagccggcttccgtattgtctgggaaacacagtgttaaggcttccgtttagcggcggaatgctcttttccatgcgcttcatcagctgcaatgacgtctgaaacgggcacgtgattgttctttttctggccggtcacccggttgcgctgttttttgcccattatgttcactcctttttctttaggcttgtcatcccgcatattctgcccaagatcgccccagtcatgctgatgattgtctcttaccgttattcagtgtacaatgggtgggagtttgaataggcaggaggaaaaggaaatgagtgtacatataaacgctgaaaaaggccaaattgcggatacagtgcttttgccgggagatccgctccgagcgaaatttattgcggaaacgtatcttgaaaatgtggaatgctataatgaagtcagaggaatgtacggatttacgggtacatataacggcaaaaaagtatcagttcaaggcaccggcatgggtgttccgtctatctctatttatgtgaatgaactgattcaaagctatgatgttcaaaacttaatcagagtcggctcatgcggagccatccgtaatgacgtgaaggtgcgtgacgtgattttggctatgacgtcttcaacggattcacagatgaaccgtgtcgccttcggcagtgtagattatgctccttgcgcagacttcgaactgcttcataaagcgtaccaggaagcgcaaaaaaacaatcttcccgtagcggtcggaagcgtattcaccgccgatcagttttacaatgaagactcccaaatcgaaaagcttgccagatacggcgttctcggcgtagagatggaaacgactgctttatatacgcttgccgctaaatacggcaaaaaagcgctgtctatcctgactgtaagcgatcacgtattaacgggagaagaaacaacggcagaggagcgtcaaacgacttttcatgatatgattaaactggcgctgcatactgtttcgtaaacttgagatgagggttatgctgattaaagcagccctcttctttatgcatcgccctgattcaaaaaaagaaaggtaagtgtaaaatgaagaaatccactaaatggttctcgctcgctgccgctctcagcgtaaccgcaatcgtgggaaccggctgcagcatttcaggcggcgacagccacaaggacacaaaaacagcagctgaaacaaaacaatcagatgacacatcaagcaaaaaaacaacgaaggcagaaaacagcgattttgtattggagagcaaatactttaatgatattaaagaagtgaacgggcttgagaccattcaaaacccgacaaatacacttgcgctcgtgaataagacatacacgctgccgggagattataaaccgaatgatctcgtgatcccgaaagtcgaattttcttttactgagaaaatcgagaaacgatatatccgcaaacctgccgccgatgctttggcggaactattcagcgccgggaaaaaagaaggttatgacctggttgccgtttcaggataccgctcttatgacagacagaaagttattttcgataatgaagtcagtctgaaaggtgaaaaaaaggcgaaagaagccgtcgcatatccagggcaaagcgaacaccagacggggcttgccatggacatttccagcaaaagcaacggatatgagctgaatgaagcgttcggaaacacggcggacggcaaatgggtgaaagaccatgcgtatgaatacggctttatcatccgctatcctaaaggcaaagaaaatgtcacaaagtatgagtatgaaccatggcatttacgctatgtaggcaaaaaagcggcaaaagccatccatgaccatcaattaacgcttgaagaatattttaatgaagtaaagaaagtgtaataagaagaagcccgcttgaaaaatagaaagcgggctttctttattaccagaagagtaaacctccaagcgcaaatccggtaattaaaccaaggccgataccgtaggctgctccccagcctccccagcctccccaatagccgaacccgtatcctctgtgacggccgccgacaggggcgatatacactttgctgttagtcacccgtacgattcttccgacgtggactctgccgtttcgttctgtaattcttgctacttttccctggtgctgccggcaaagatgataatagttttgcatcttttctcctcctatccaacctatctttctatgtcagcttatgatagagtgcggtaaaaaggttggacgaaaacaggaggacaatcgccgttttacttgtaagcgacaaaagcgcagtgtcccatatattcacggtacgtctgcataagctcgtaatgagccgtcagcgtatcgtagtgaaccggctgaataacgggcgataaatccatttctgtagtcggctcctgcgcattgttttcatagacagcgggaatgaaatccgctttttgaaagccttgctgaagcaatctctgtttccatgacgtttcatcctgcaatacggtaaaaccgtagaagtcttttatctgcgtgatggcgttttccggcatgggcttttgtaaagcagcttcaatgccgatcagcatacccccgggtttaaggacccgcaggatttcagacagcgatgaatcaagatttgaaaaggtgagaactgattcggaaagaacggcggaaaattgattttcagcaaacgggagccgctcaagctccgccaaatagcccggaatggttaagccttcagcggcaaatcgttttgctgctttttcaagcataaggggatccttatcaacacaggtgacggggtacagcaggtgaccgagataagcggccgtctgtcccgttccgcagccggcgtcaagaatcggttcgccaggaggaggagccgcttttgtgagaacggctttggaaaaagcgagcccgcccgggtgagcccctccgactccgaataaggacagcatttctaaatatttgctcaaaggccgaatcctccttttttcctcagcatatgttgagagaaaaacataggtttgggtaaacgggaaagaagggcgcctcacgtttgaagttgacgaatgagcgttcgtctatgataataatgtaagaataaaaaggtggtgttttcttgaagcggcaatttaaactgttttttattatattgatcaccgcggtcgcagcctcggcgcttacgctgtttatcacgggcaatacgaccattttcggacaaggctcggctgctttgacgaacagcaaatttgagaaattcaataaagcctacgaacagattaaaagtgattactatcaaaaaacagatgacagcaaattagtagacggagcgataaaaggcatgatcagttccctggatgatccatattcttcttatatggacccgcaggaaggaaagtcttttgaagaaacaatttccgcttcgtttgaaggcatcggcgcacaagtggaagaaaaggacggcagtatcctgatcgtatcgccgattaaagggtcacccgcggaaaaagcgggggttaaaccgaatgaccagattttgaaggtcaacggcaaaagcgttaagggccttaatgtaaacgaagccgtcgcattaatccgcggcaaaaagggaacaaacgtcaagctcgtgctgcacagagcgggtgtcggcgatctgaacctgtcgatcaaacgtgacaccattccggttgaaacggtgtactctgaaatgaaaaaaggagacatcggcgaaatccaaatcacatccttctccgaatcgacggcaaaagagctgaattcagccattgacagcctcgaaaaacaaggagcgaaaggatacattctcgatttaaggggcaacccgggcggactgatggatgaagccatcaaaatgagcaacatgtttatcgataaagggaaaaatatcatgcaggtcgaatacaaagacggcacgaaagaggttatgaaagcgacgaaagagcgcaaagtgacaaaaccgacagtcgtcctcgtcaatgacggcaccgcgagcgccgcagaaatcatgtcggctgcgctgcatgaatcatcgggcattccgctgatcggcgagaaaacgttcggaaaaggaaccgtgcagacggcaaaagattacagcgacggttctaccgttaaactgacaatcgctaaatggctgacagcggacggagagtggattcataaaaaaggcatcaaaccgcaatatcaggttaagcttcctgaatatgcgaacctgccgtatttagatgcgaaaaaaacatacaaatacggggattccggaacgaccgtcacaaatgcgcaaaaaatgctgaaagcgctggggtacagcgtgaaagtaaacggcacgtatgataaagcatttgaacaagccgttaaacaattccaagcaaaagagaaactgaaacaaacaggcattataaagggagacacaacggcaaaattgatgacggatctgcaaaaacagcttgcggacaacgatacacaaatgaaaaaagccgttgaaacattaaataagaatatgaaatagtaaaaaacacccgatgcgccgctcgcgcattgggtgttttctgtttgcgaaaagcccgtcttatgtcgtttcctgttcaaaaaggtggctgttcgcctgaatgaaaaactgtgattgctcatagtgataggtgacttttgagaagtcaaacggctggccgttggttaaatgaaaaatcgtttcaacgcaaagcttaggcgctcctgtaaacaggcctaagtactccgcttcttcctcatttaacatccccgcgtacagatataaatctgaaaaaccgcgctttaatccgagaccttctctaatataatcaaatattgattctgccacgatctctttattcaaatacgtaataatcgatttgttgtaaaatgactcttcgatacacaatgtcatcccgtcaatatatcggattcgtttgacataatacacgtcgccgtcaggcggcatattcagattttgggcagcctcaggcgtgggttttctcacttccagcgctaataatttggaagtgacattaaaatcttccagcgattctttaaatccctgattagaaagcagactgatatacccttttcttttattccgtctgacaaaaatgccgcttcccctcacttgaaacacaatcccctttttttctaataaatctaaggacttggtgatcgtgcttttgctcacgttaaaccgggtcattaaggtttgcagcacaggcagtttatccccttgctgcagctgatgttcttctatgtatttttcaatatctatcgcgatttgctggtattttaacatatacattcctcattcatttattgtcccgcttcttccagaattatagcataatcgtttttaaaagccatttcgtaaattaactataattgtttatgtattgataaattataccggtacaattataatgtaaacgtataatatgaaaatgaaggcaggaattcttctgcacttgcgaagcggatgcttgaagcggctgcagtgcatttattcggcatgcaagcggcagtcaaataaaggaggatataaacgatggggacattgccaaaagattttttatggggaggcgctctggccgcccaccaatttgaagggggatggaataaaggcggcaagggaccgagtgtagtggacgttatgacagcaggtgcgcatggtgtgccccggaaaataacagatacaattgaagagcgggaattttatccgaatcatgaagcgattgatttttatcatcgttataaagaggacatcgcattattcagcgagctgggtctgaaatgtttaagaacgtccatcggctggagcagaatttttcctaaaggtgatgaagccgagcccaatgaggaaggattggctttttacgaccgggtgtttgatgaattgctgaaacatgggattgaaccggtaatcacgttgtcacattttgagatgccgctgcatttggcgagagaatacggcggtttcagaaacagaaaaacagtcggattttttgtaaaattcgctgaagtgtgttttgaacgctataaacataaggtgaagtattggatgacgtttaacgaaatcaataataagatggatgtgaataatcctatctttttatggacgaactcgggcgtcgccgtcaaagaaaacgaaaacgcaaaagaagtcatgtatcaggccggccatcacgaactgctggcaagcgcattggctgtttcgaagggaagagacatcaatcccgagttcaggatcggcgcgatggtatcacatgttccgatttacccgtactcatctcaccccgacgatgtgatgctggctgaagaaacgatgagacagcgttttttcttcccggacgtgcaggttcgcggatattatccaagctatgcgttaaaagaatttgaaagagaaggttatcagatacactttgaagacggtgatgaagagattttgaaaaacggccgagtggactacctcggattcagctattacatgtctacaaccgtaaaaagtgatgtatcaaacgataataccggggatgtcgtaaacggaggattgccaaacggtgtggaaaatccttatattacagcgagtgattggggctgggcgattgacccgaccggtttacgatacacattaaaccgcttatacgaccgctaccagattccattatttatcgtggaaaacggattcggcgccatcgacacattagaagaggacggttcaattcatgacacttcaagaattgaatatttatcgtcgcatataaaagctttgaaaaaagcaatcacatatgatggtgtggatgtaatgggctatacaccatggggaattattgatatcgtgtcatttacaaccggagaaatgaaaaaacgctacggcatgatttatgttgatcgggataatgaaggcaacggttcaatgaggcggcttaagaaagactcatttgaatggtataaaaaagtgattgaaacaaacggctcatatgtatcttaaaggtgtaaaaagggaaggcttcaccgttgtgtgaagccggctttttatcagtaattttgaaagcgtattcatttaagcggaaaggaggtgactgtccggcttttcatttagaatcgcttataaaaataaggaaagggatggtggttcatgttttttaaaaaaggtctgcacatgaccctggtttttcttatgtttttctttttcatatcaagcagcacggaaaccgaagtgtatgcggctgatcggaaggcttcagacaaaaacaaagtaagggtgtggttcagttctgaaaaagatccggcttcccgtacgtggtatgacgggccgctggaagtgaaatacgccttagacgaacaaacaccgcttacatggacaaaaaagaaggcttctgactccgccgccgtgtatattgatccgtcgcgccgctatcaaagtgtgttaggcgtaggatcgtccctggaagaatccacaatccataatttatcaaaaatgacacccgcaaaaagaaaagaagtgctgaaaaaactggttgatcccaaagatggtatcggaatggacgttatgcgcataacgatcgggacatctgattttacggcacaggaattttatacgtatgacgatatgcctgaaggccaaacagatcctaagctccatcatttctcgattcaaaaggatattgatttacacattacagcaaccatcaaggaagcgctggcgataaatccggaactgaaaatcattgcctcgccgtggagtccgccggcttggatgaaaacgaatgaaaacctcaagcggggaaagctgaaagataaatatatcggcgcactggccgtttacttccgcaaatttattgaggcgtacgaaaagcaaggaattccgatttatgccatgacccttcaaaatgaacctttgctggaaatcgactatccgagcatgtatatgccgccgtctcagcagcgcaaactggcactggccttaaaaaaagaaatgaaacaacaagtaattgacacgaaaatttggatttatgatcacaatgcgagcggggcgtggaactatattccgccgattttagatgataaaaaaggaaaccgggcggcagacggcatcgcttttcacgattatgacggtgatctttccgtcatgtcggagatcggaaagagatatcctgataaatctattcacttaacggagcggtctgtctgggggacggcaggggcggaccggatcgcgcagtatttccgcaacggcgcgtcgagctacaatgcgtgggtgacgatgctcgacagtcaaatcaagacgcatcattggataggcaccccggacccgacgctgtttattcaggatgctaaaaaacctaaccgctattggaatatcccgatctttcatatgacaggcaacttttcaaaatttatcgaccggggagcaaagcggatagaaagtaattacggctccaaaaacacagtctcgaatgtatcgttccttaatcctgatcaatccattgtgacagtcgtaatcaaccagacatccgccgatcaaaaattccatgtcgtttcagaaaatcggcagtttgaagctgtcatcccggctaaaactgtagctacctataaatggaagagaaaaaagtaaaaaaccggcacatttacgtgccggcttctttctgttaagcgcctttttggttcagttcatcagaaggcgctttattgaataaaccgtctttgacggcgtttgaagccgctttttttacaaaaaacgggttgaggataataacggctgccatattagcggtcaaaccccaaaagccttcatatagaccgtgggcggattgggtgatatttaccgtgaatgtcacgataagaccgacgagaagaccgataattgtcgcttctttcgtttgattcttccaaaacagactgacggcgatagccggaaagatctgaaccatgccggaaacaccgagaagctgaagggtaacgagcgcagtcgggaacagcatgccgaataaaagcgcgagcccgatgacgacaaataccattgaacgggtgatcatcgtcagcttgcttggtgacacattcgggtgaatcaaatcccgatataagttattcgcaaataagtttgatgctccgatggccatgatagagcagggaatcaatgacgcaagagcaatcgtggagtaagcaaagccctgcgcgactccgccgtaagacgtttgaatcagcttcaataaagcgagccgcggattggtatcttccggcaggacaagaaacgcgataaagccgagaaaaataacaagaatcaaaacaatattataaagcggcagaaacatgctgtttttgcggacggcatctgcgctttttgccgtaaatacgccggttgccgcatgcgcccacataaagagcgccagcgcagatacgatggaagctgtgataaaccaaggaattcctttcggccccgagtccggaatcgtcagcatttgcggcgctttttcagccaaagtgtgaatcatcggcgtccagccgtgaaaatggatcagcgggagtgacacgaccataaacagcataatcacccacacgagaatgtctttaataatcgccgtaaacgtcggccctttaattccgctgaaaaaagtatacagcgctacaagaataaaagagatgatgacgaccatattgacattaatgacacccgttccggccacctgaagcgtatcttgaattccgctcagctggagacaaatataaggaatgagcataagaacgccgacaatggcgacaagactggccaaaagtttactgtcaaaacgctcacgggcataatcggcaagcgtcgttaatttgtgtatttttgccactttccacagcttcggcagaaagaaataagcaataaaatacgccaaaacagaatacggaattgcaaaaaaagctacgcttccccctgtgtaggcggtgcttgtcaagcctaaaaacgtataagccgtatagaggtccgcgccgactaaaaaccagacgaggagccctccgaaccgtcttccgccgacagaccattcctcaacagaagtacgtgatgatttgtctcttccggctataaagccgatacagacaacggttaaaacgatgacggctgtaatgatcaatgctgttatatttgcgggcatcagtccagtcctccttgtttcttctgcagcctataaataagaaacgaacataatggagtgactgcgatccataaaagcagccagaaatgaaaaaaaggcagcccgataatgatcggatgaacccgattagcgactgacagcagggccagctggctgaaagggattaagatgagaacgaaaattagtgcttttctgaccatttactttcctcctgaaacttgataatgctccttatcatagcaggtgtcagataagatcacaagatatttttcagaaaaaaaagaattctattacttttttaactgaaacactttagttgcatcttcattcatattaaattagaatagttaatatctcgaactcaagatatttaggagtgaatacattgaatacacaaggattgcaccatgttaccgcatttgcaaaagatcctgttgaaaatcttcggttttatactgaagtgctgggtttgcggctcgttaaaaaaaccgttaattttgacgacccggccacttatcacttttatttcggcaaccaaaacggagagccgggcacgatcattacattttttccttttcagggaagccgcccgggaaccgtgggaaaagggcaggccggaagaatttatttttccgtgccgaaaggagcactcgcgttttggaagcgccggcttgaagaaaacggtttgtctgtaaaagaacagatcatgctgtctgaacaagtccttctctttaatgatacagaagacctgccgcttgccataatggaagatgaaagaagcggacagagtgaatggactcctccgggcattactgaaaaagaagcgatcacaggcatgagaggtgttcttctgtactcgtaccgtcctgaagcaaccattcaatttctcatagaacgcttcggttattcaaagacaggagaagaaaatcagattgtcaggctgcaatcggaggcacggatcggacatattatagatgttgaccttgcgccgaaagaagcaggtgccggcggttacgggacagttcatcatgtcgctttccgcacgagcgaaaaagagcaggcggagtggaaggacattcttgctgattctcatcttgcttcatctgacattcttgacaggtcatactttacttcaatctatttcagagaaagcggcggcattttatttgaaatggcaaccgatgaaccggggtttatgacggatgaatcttttgaaaatctcggaacagagctgaagcttccggaatggctggaagagcatcgcagtcagattacagctgttctgcccaaaatggagaaaggagaatgatgatgaaacatgtgtttgaacagggtacgtcagaaaatgttctgctgcttttgcacggaacgggaggaaatgaacatgatcttctgtcgctcggacgttttatcgatccgaacgcaagtctgctgggggtcagaggatcagtgtcagaaaacggcatgccccgtttttttaagcggctgaaagaaggcgtatttgacgagaaagatttaattgaacggacggaagaattaaagaatttcattgatgaagcggcgcaaatgtacgggttcagcagagaaaacgtgattgctgccggctattcaaacggcgccaatattgcagcaagtcttttgtttcattataaagatgtattgaaaggagcggttctgcatcatccgatggtgccgatacgcggagtgaagctgcctgatatggaagggctgcctgtgtttatcggtgcgggaaaacgcgatcccctatgtacaaaagaagaatcggaggagctttatcagtatctgacagatgctcatgcatccgttgctcttgaatggcaggagggcggtcatcagctcacacagcaggaagccgagcaggcacgagcctggtacagtgagcgattcctataaaaaacccttagtctgcttaagcggactaagggtttctttcatcttacagccaagttgacactttagatacaggcagccggttgcttttatgcgccggcttaacggctttaccgattgaaatcagcatgacgggcacgaaacgctcactcacgtcgaattctttaacgaattgctctttattgaatccgccgatcgcgcaagtgtcgtagccttttgctttagcggcaagcatcagctgcatcgctgctaaagaagcgtttaaaaatgctgaatcgcgggcaaactgatcattttggtatgcaccgttaatctggcctaatagcgtttgtttaatctcttctgtgatattgccttgctcagccagttcagcataaacttcttcaccattttcatttgcttttaagtcgcctaatacggcaataactgctgatgaatcaataatctgtttttgattaaaagcaaccggaagcagggcagcttttgcttcatcactgtgaaagacttgaaaatgccaatgctgaaggttccaggcggaaggcgcttgcgttgtgatttcaaggagttctgtcaattcctcttttgtaatgaccgcgtctttatcgtattctttaacagatgcgcgttcctttaaaacgtctaatacggatgtcatcatgtttcctccttcggataaacgtgttatcataatagaaaagttagaagcttactaaatgtaactcgaaaactaattttaatggatcacaaaaaacttgtcaattcatagatgaagggatgaactcacgtgggatatacaatgtgtcctaaaatggaatccgctttttctcttttgggaaaacgctggaacggcctcattatccatgtactgatggacgggccgaaacgatttaaagatatgaccgaaacgataccgacaatcagccaaaaaatgctcgcggagcggctcaaagagctggaacaaaatgaaatcgtcgagcgtcaggtgctgcctgaaacacctgtcaaagtcatttataaactgactgataaaggcatggccctgcaagccgtttttcaggaaatgcaaaaatgggcagacagtttttgcgagcccgggggatctgcgaacgacacatgtgatgaataataaaggctgcccaaggcagccttttcttaatgatcatgtttactcgtcataaaaaccattaatatcaaaattgttcagattgaggttcaagccttttaattgctttaataaagcatcgaatgtaaggaaataatcatttttacattccgccggaacatcgtttggagaaaatagtttcattcctccctcaatccactgtttccggtataactgaaatgccgcttcaattaaatgatcaggcgttacaataaaccctaagcttacgtcatggtcctcactgtagccgaattcaaacccgcagcaggggcaaatatcaaatgttttttgatattcgccgttataaacgggatttgtctctaatcctttaaatccgcatatcaaacaaggatacaactcactaaccaacatacatccctcttttattcagtttgcaatcattcagaacaagcggggaggccttttacagtttcccggttaaaaactgagcctcaccgagcccgaagctccaatcggcgttcccgttttctgtaatggaaatcatgacgtcctcgggtgatatgccgcattctgttttaagctgatcagccatcagttgatataacgtttctttctgatgttcggtgcgcgctttgctgacaatgctgatgatgacaagatctttgcttcttttgaaaccgagcccggtatcttctatgataagctcatgaggccgatgctggtgaacgatctgataacggtccgttactgggacgtcaaaagctttaaccatggcgtaatgggcggtatccagtaatttttttaatgctgcgtcatcccggccttcaataacgtcaaaacgaagtaatggcatattttattccccctgatggttttataatgtcgcaacttgtaaaaaaagtataacagttaatcaaaatataatcaaattataaccaaaatatttacatcttaatgcaatatcagagagaggcacaagttgttacaaccgcccaatcaattccctcattttatgaatacgcttaagaataggcagacataaaggaggaaaaacatgtaccctcgtcatgcattgtatcgcgggaatttcggtcctgccggatttccggcgagaagtccttttttgttcggcgctcctttattcggcggatttttaggcggtcttctcggaggcgtgattgccacaggttttacaagacctcgttatccgtacgggtttgccggttacggatacggaggcgtcccatacggcggtttcgggccgggagccggcggttatccgccattttattaagaaaaaacggcctgcatcgcgcgggccgtttctttatcttaaaatctccacttccgatagattgtagtcttcctgttttgaaaacataacttcaatcatcccgtctttatagactgcttttgttcctttccgtttgacgaggctcggaagtacgatttctttttttccttctcccaggctgctgttctctacaacgaggctgtgtgacgtatgcttaatcctgatacggtcgagttcctcttgttcggcgggaattttcgcaaaaacatgatcggatgtttcaaacaggtcaatttccggcttaagcggttccgcttcgaccggatcggtctttttggacatcgggtcgcgaaaagggaactgtccggcataaccggcgccgaatacgctttccatcactcggttgacatatgtctcgacatctttcggatcagcatttttaaacgtttctttagagaactgattttggaagggaaaatatctgttccaatcaaacacggcatctcaccctttcttaacggacaacatagtatatgcccgccggaagcttcccgtgatataatataatctgtttacagaaaggaaggggaaggccgtgcaagggaataacgtaagaaaaggaatcatttataccgcttgttctttcgtcatgtgggggctgtttccggtctattggaaacttcttgaacaaatacccgcattggacattttagctcacaggattttatggtcatttgttttcatgtgtgtgcttttaactgtgcttaagaagtggaaaaccggatggcgtgaactgcgtcttttgaaatcggaagggggcctgctggcgctttttttcgcttccgttttaatttccgttaattggtttgtgtacatatgggccgtcaatcacggctttttgcttgaagcaagtctcgggtactacattaatccgctcgtttccgttcttttgggcatcctattcttaaaagaaaagcttaacaagatgcaaacagcagccgtttctattgccggggcggccgtgatcatatctgcgtttcaatatggcgcggttccttatatcgcattgctgcttgcattcagcttcggtctgtacggcttatgtaaaaaaagaacccgcatgtccagcacgatcggactgtcgctggagacgcttttgattaccccggctgcacttatttatttaggatatacagctgacgggagcactcccgggtccttgggggcaggaacatgggcgctcctattcttcgcaggcgtatttacggccctgccgctgttgctgtttgcagagggggcaaagcgtctgccgctgtatcaagtcggcattttgcaatatatagcgccgaccattacccttatgctcggcgtatttgtgtatcatgaaccgttttccgggcaaaaagcgtttaccttcatttgtatatgggcagcattgcttttgtttaccttttcacagataaaatggaagcggccgataaaaagccgctaagcctttcgctttccagcaatagcttaaattatgtataatcattacgagtatgtaaaggagctgtacaatgggcactgataaagacatagcaaaagcctatcaggcactgtggaataaccgcactctcccggcttcaactcttgaagaagcggagaaggcaattgatcttgaactgcttgatcaaagaacacatccgaggctccggaagtcacccgaggaaaagtttgctctggcggtgcagcgaattgtagattcccggctgcggccgattgagaaatatgaattggttgaactacatacgaagcgtttgcaatttttaaaagaagaaagaggggagcagctatgaaagcgatcataaaagaagatgtgcaaacttctttagagcgatatgccgatcgtcctgtatatatccatttggaaacaacgaccggttcttattcagcgcatctgaatgagaaaaacatgacggttgtagcctatatacgcaatgcaaaagtgacgtaccatcaggcgaaaatcaaaggaaacggcccgtaccgcgtcggtttgaaaacggaagaaggctggatttacgcagaaggtctgactgaatatacagtagatgacgaagaccgcttgttaatggcagggcatctgccgggcggaaaattggcgatttcgcttcaaatcagcgaaaagccgtttacagtttaaagaaaagggtgaaaatcatgaaagaacatgtactcgtcatcctgcctcaccctgatgatgaatcatacggagtggcagggctgattgctttacacagacaaaaagatattcccgttacgtatgcatgcgcaacgcttggcgaaatgggccggaacatgggagatccttttttcgcgaaccgtgaaacactgccgctgttaagaaaacaagagctgatcgacgcatgcaaagcaatggacgttactgacctgagaatgctcgggcttcgtgataaaacactagaatttgaagatgacgagtggctcgcggatatgatggaagagattatcgacgatgtaaaaccgagtctgattgtcacattctatccggagcacggcgtccatccggatcatgatgcatgcggcgaagcggttatcagagcgctttacagaaagaaaaaagaggaccgcccgcgcacgctttgcatggcaatcacccgcaacagggaggaagccgtcggcaagcctgatgttattcttgatattaaagaggttgccgatattaaaatgaatgccttaaaagcgcaccgcacccaaacggaaggcatgctgagagagctggaagaaaaaataaaaaataacgagccggttcttcagacatggtttgaagaagaagtgtattggacatatccgtggaaagactgataaaaaaagggataaggctgaaatgccttatccctttttttgtgtcagatcggaagcgatcgcttctgcaagcgaagaccttattgataaatttgaaaaactcagtccgagctgcactgcggtttgggcgatttcaggacggattccggatattgtcgctttcacgccgagcattccgagtgattcaattaaggtgaaaagctgttgggcaaccatcgtatcaatcatggctacgcccgataaatcaatgtacagctgcgtgatgcgcttctctgaacactggtgcagcgtattctccaagatcatttttgctcttgccgtgtcaatatccccgatcagcggcagcagtccgacattgtcaaaaagcacaattaccggcgagctcagctcggtgatcaattctttttgcgcttcaagctgaatgtttgtgtttttatacatttcctctatgaaaatatgaatcaccacatcaaacgatttaatcagcgtatggaatatatcttcggcatcttcttctgtcaaggtgtctgaatgaagtctggtaaactgcttgacatggccgacatacaaatcacgaactctgataaactcgcgaatgatgtaatggatgggagtttttaaatgttcttcatcccgtgcggcttcaaacgcccacttttccaatgccgctgtatatacttccttctcttcagaaaaaatccgattgagctgataattaaacgccagattttgttttttcagattcgtgagtacagccgggtcagtagaagcataaacagaatcaggatccgtatcatgaagcgtatcaaaccatgtctgactgatgtcctccgcccgttcagttaaataatcgtacagcagtttatgttttggcattgctgctcctcctttatgaaattatcattttttttacataacgcgtttgcagcttcatcagtctgaagaataaaccgacagctcctgcggcaagtcccgcaattaaaccgatccagtagccgtatgccccgaggctcgtataagtgccgactgcgtaaccgagcggaagcccgatgatccaatacgacacaaaagccgcgccaagtgtatagttgacatccttatatcctctcagagcgccttgtatcggagctgctacggcatcagaaagctggaaaaacagcgcatagattaaaaagtgctgcgtcaacatgagcaccgccggatctgatgtatacattccggcgatttgcggcctgaacagtaaaatgaaagccgccgtgcataaagaaaaactaagcgccatcacgatcccgatatagctgtatgagcgggcatctctatagcgatttgcacctgcttcaaagccgaccaaaatggtcatggccatggatacgctgagcggcagcatatacaagagggaagcaaaattcattgccgcttggtgggctgcaatcgtcaccgtctgaaaatggctcataagcagtgtgacagccgcaaaaatgctcgtttcaaaaaataccgcaaaaccgataggcaatccgattttcaaaagcttcctgcattcagacggagaaaaacgatacagtttccgaaatacagagtacccggcaaacggctcaaatctgcagacgataaaaaagctgatggcgcaaatacaccagtaagtcagggcggaagcgagccccgccccgactcctcccaatgccggcatgttgaatttcccgaaaataaatacataatttaaaacaaaattaataggcaatgagcaaagcgtaataagcattgtgactcgcgttttgccgagtgcgtcaatgaacgagcgcaaaacggtgtacacaaacaaaggaaaaataccgagggataaaaatcctaaaaagtgttttgcgatcgtccggacacgaggttccaggcccaaatgtcccaagatcatatcaacggtgaaaaagccgatcaggataaccgccgcactgagaacggccgctacataaacggcctggatgacggaaaacggcacttccttttgtctgccggctccaaacagctgcgaaacaacgggcgtaacggccattaatattcctgccaggcccgtataaaccggcgtccacaggcttgaaccgattgcaaccccggctaaatcggcagcgctcactttccctgacatcaccgtatccaaaaaggtgatcagggaaaggcccgcctgtgtgattaaaatcggaatgaagatatgtaacagctgtctgaccttttggccgatcgtgttcgtttctctcaagttaggttccccgtttctttattttaacgagagaaattataacattttatgtataaaaagcaatgaaagccggcctactcttttttgtccggtttcggctttttaaacatcttggcataaatgaatgaaagtgaaatgacccctaaaaaggtgcagatatattgcatcagccgtgcgaattccatatgatgtgcgcctcctttcatgattatggtgcacacagcggcgcatatccatgcgcacgatgcagaaaataagggaaaggagctgatgtgacatgcgccacactcaaatgacggaaagcgcgtttaccgctgccgttcaaacgtatttgaaacaaattacagaggatgccggaatgatactgcggacattgaatgaaaaagaccaatgccttctttgcgaattagatgaactgggacatacgtttcaggaaatgcaggctgtcgcttcgtcgttttacctgcagtcatatatcgaacatttcacgccttcctatacagagctggcgagggccgtgcagcatctggcggaagaaaaacacggagcgctgattgtgattgaacgtgcagatccgctggacggaatgatacaaaaagggaccagcctgcatgccgagatcagtgcagctttaattgagagtattttttatcccggcaatccgcttcatgacggagccgtattggtcagagaaaaccgagttgtatcagcagccaatgtgcttccgctcacaacaaaacatgtcgatctcaaatacgggacgcgccacagggccgcgatgggactttcggccgtgactgatgcactcgtgctcgttgtttcagaagaaacgggaaaaatgtcctttgctaaagacggcggactgtatccgcttgtttcgccgcgggcgcttcatacgaaataataagaaaatgggaatattgtacccatttaatattaataaggtgaacatctttacctttttctgtattgatgttatcgtttaaatatacataaaatttaaaagaatagggagtggaaagatggcaaatgtattgatgatcggctttccgggagaaggccatatcaatccgtctttaggcgtcgtaaaagaactgaaggcaaaaggggaacatgtcgtatattacggcgtgaaggaatatgagaacaaaatcgcgtcaagcggagcggaattccgtgaatatgaagatttccgaaaagatgaattcggaaaaaacgcaacgggtgatgaacagcgggacgctaccgagtttttgcttttaatgattgagacttccaaaaaagccgcactccgtattcttgaggaagtaaaagatgaatcctacgactacatcctgtatgatcatcattttctggcaggaaggcttgtgagaaaccagctaaaactgccggcatattcactttgtacgacatttgcaatgaatgaagcatttattaaagaagtgttttcaaatacaaaccttgtatcagaggaatcatctcattatccggcttataccgaagcggtcagccggctcaatgaagaattcagcgcagacattaaaacgccgtatgatattttctcaaatgacggcagaaaaaccatcgtatttacttcaagagcgtttcagccgaaagaagaagagtttggcgattcttatctctttgtcggtccgtccataaccgaaagggcggcggctcaagatttcccgtttgaacagcttgcaggagaaaaagtcctgtttatttccatgggcacgatttttaacaatcagaaggaattgtttaataaatgcttaaaagcggtcagaaactttaacggaaaagccgtcatgtcaatcggcaaacatcttgatcctgcggagcttgatgaaattcctgagaatgtcattgtcaagccttatgttccgcagcttgagatcctgaaaagagcggacttatttatcactcacggcggaatgaacagtacgagcgaagggctttactacaaaaccccgatgatcgtcattccgatgggcgcagatcagttcgccgtcggaagccaagtggaaaacacgggcgcgggcaaaatgtttaaaaaagaagatgtaacagcggaactgctcactgaagcaataaaagaattgagcgaaaatcctgaatatcagacaaaagcatctgaaatcggagaatccctgaaagcggccggcggagcacagcgtgcagcggaattgatagcagaagacgtgaaaactgccgagacccgggttttgtaatcagccatcacccgcttcctttaaaggaagcgggctttttttgattgtttttcgggaggatttttcacgccgtaaagagaattgtatgaaaaacagacaagaaaggtggaatgtcgcggaaaaaagccatgttatgaaaatgattccaaagtcttttgtgaaatgttctcaatttatgtaaaatgtgtgacattggtgatgatctaaggccaaatgattcggaattaatgtcgacttctgaatgaatcctgcataacaggcggcgtccaaagaaaaggaacgtccctttcagcaatgataaataggaggtttttcgttatatgaagaaaaaaatcgcagccggactggctgtatctgcagtaatgacttcaaccttcgccgtgcatcccgctgaagcaaaaaccattcaagtaaaaagcggcgactctctttggaagctttcccggcaatatcataccagtatttcagccctgcagtcggaaaataaactgaaatcaacgatactccacccaggacagcggctgcacattcccgacggcagcggcacacataaaacggggcaaaagggaaaacgaagcacgggtgcctacacagttacatacggagactcgttatgggtgatcgcaaaaaaatacaaaatgagcgtttctgagctgagaagcctgaaccgtttgagttcagatgtcatctatcccggccagaaactgaaaattaaagggtctgccggcggcacggacggaggcggcagacagacaaagcctgataaaggcgcatcagggacttacactgtgaagccgggtgactcgctgtggaaaatcgccaatcaaaccggcatcaccatcgccgatctgaaaaagctgaatcaattaacatcagacatgctgtatccgaatcaagtgttaaagatcaaaggttcttcacataacggaaacagcggcacaacaccgccatctcattcaaacccttctgagaagccatccacttacaaagtaaaagcaggcgattccctctggaaaattgctaatcggttcggcatcaccgctcagctcatcagagaaaaaaataaattgacaactgatgtgcttcaaatcggacaagttctggtgattaacggaacgggaaaaacagaagatcctgtacggcagccggataacaaaccggcaaaaccaaacaagccgaatactcccgaacctccggtgacagggtcaaagattgacagaatgataggcgaggcgaaaaaacatgtcggcgtgccttaccgctggggaggcaatacgcctgcgggcttcgattgcagcggttacatctattaccttttaaataaggtaagctctgtttcccgtctgagcacggccggatattggaatacgatgaaacatatcagccagccgtcagcaggcgactttgtcttctttacgacatataaagcgggcccttctcatatgggaatgtatttaggcggaggagattttattcacgcaagctcctccggggttgaagtttcaaacttaagcaatccgtattggaaaaaagcttatttaggagcgcgcagttatttttaaaaaaagcctttcggggctttttttgtttaccattttcacgttttgacaagactgatgggtaaaaaaataagggggaggaagcatgaatcgtctcttgctttttctcatgctcgcatcaattacgctttgcggctgcggggggagacccgctcctgttccgcccaaaaaacatggggaaagccgcgcattggaagcatctgcataccgtgagcatgccggactcatcaatcaaaacgggaaaacgatcggatatatcgaagtgagggaatctgatgatgaagggtcagacattcatatatcagcggggcatctgccgcccggcacttctctcgggtttcatatttatgaaaaagggacatgtcaggcacctgatttcgaatcagccgacggtccgttcaaccctttgaacaaagaacacggcttcaacaatccgatgggtcatcacgccggggatctccccaatcttgaagtgggggctgacggtaaagtggatgtcattatgaacgcgccgcaaacttcattaaaagaagggagcagactcagcctgctcgaccgggacggaagcgcgttcgtcattcatgaacatacggacgattatttgacaaacccgagcggaaattccggagccagaatcgcctgcgctcccctgacaaaaagcgcccgcagggaatgagcccttttgtattgagtatacaagggcttttttagtatactcggttatggaatacaaatggaaaggaaacatcacctatgacttcagaattacagcacctatcacttccggaagatatacaaaacaaactgcaggcttatcaaaatcatcccgtttcccaagaattccgggatttaatcggatcatcaggctatgaggccgaagataaagcgattgtattcgatgccgtcattgctttgacaatgggaaaaaatatcttattaaaaggaccgacgggttcagggaaaacaaaattggcggaaacgctttcgaactattttcataaaccgatgcacagcgtcaactgctccgtagacctcgatgcagaagcgcttgtcggctataaaacgattgaaaatgaacagggacaggcgacaattgaattcgttcccggacctgtaacaaccgcaatgaacgagggacattttttatacattgacgaaatcaatatggcaaagcctgaaacccttccgattctaaacggcgtgctagattacagaaaaatgatgacaaatccctttacaggagaagtgattaaggcaagcgaaggattcggtgttatcgccgcgattaatgaaggctacgtcggcaccgttccgctgaacgaagcccttaaaaaccgttttgtcatcattgatgttccgtatattaaaggaagcctcctgaaacaggtgctgacctctcagtctgtcttaaaagatgagaaattaattgagcgttttatgacgctgtcttctgatttaatcgcacaagcgcataacggacaagtgtcagaagaagcggcgtccatcagggctctcattgatacgtgcgacttggctgcgtacatcccgccgaaacgggcgattgaaagaggcatcgtagaaaaacttgacgatgacagagaaaaagccgctgtcagaaatatttcagaaacgctgttcgaatgagggatatacaatgaagtttatcaaatttaatgacagcacgattgattcgtttttgttcatgatgctgactgatctggccaaaacactgaccagaagcagtgaagttgaagtggaatacggcgtgcagtcttactacaatccctttgaaaagaaaatttacatgagccacttttggaaagaccgatcagccggggatatggaagccggcctgaaaagcgatgtctatttgcgcgctgtcggaacacgcagcagctcatttcgggaatttgcggggtttttaaatgacgtttaccggcatttcacccgccaaagctttgccaagcagctgtttatgctgcttgaggatatcagaattgaagagctgatcaaaaaagaacggccgggaacgaaacgtgtttttcagaagcggagggagatgtacaggaaatatttcacgacgcagctgacattgaatttagaacggagcattttcaccgacgctttgtattgcgcgatgtttgtcaagctgacggctgagtctccgcttgaaggcattccttccatgcatgaacatattgatatgatgataccgtatattgaacgtcagctcatccgggtgtatgaggcggattctacggaacaaatcgcaagaataacggaagacctcatggaaggccttgatgaagtacttgagaaagatatgctgaacacgtacttttttctgccggaacttgattacgaaaaagcggctgaagagcctttattcgaaagtgtaaaaaaagcgccttcgttaagtgacgatctcacgctccctgagtcttccgacggagatgaagaaatccttgaagagaaaatgaatacgtggcaccgggaaaccgaagcgccgtcaaaaagtttccttcaatttgatattgagcacggcgcgaaatcagatcttgggaaagacgcggccagagaaggcgatgacggtgaccaggcgctcggctccgttcaaggttccgcacgtcagacgaaaagagaggattactccaaactggaagcgcttgaatccattcaggatgaacatgagggcgcggggctggctgacggaaaagaaaacaaatttgccttcccggtttatcaaacgcctcataaagcgtctcctgaagaggagcagtcttataaagaacaggcaaaaacgatagaatcatatcaaaaacgcttaaagcagatgatacaaaaaacacttgagcacaaaaaaacgctcccgcggaccgaccttcacgcaggccggctgaatcgcaaactgatccgctattttacggagcggaacccgcgccttttctataaaaagcaggacccgtcttcagacattgacgccgtttttacattgcttgtcgattgttcggccagcatgttcgacaaaatggatgaaacaaaaagagggatcgttctttttcatgaagccttgaaatccgtgtccgtaccgcaccagatcgtcggattttgggaagatacgaacgaagcgactgaaacgagccagccgaatttcttcaataccgtcattccgtttgaagagtcgctgctgcaggcggcgggtccgctgatcatgcagcttgcgcctgaagaagataacagagacggatacgccatcagacaaatgacgaaacagctgatgcggcggagtgaggctcaaaaatttttaatcgtgttttcagacggagagccggcagcattcggatacgaacaaaacggcattgtcgatacgagcgaggctgtcatcgaagcgagaaaaaaagggatagaagtcataaatgtttttctgtccaatactgcgatagaagaatcacagatgaaaaccattcaggatatgtacggaaagtacagtatttttgttccggatgtcgatcagctgcccgatgtgctgtatccgctcttgaaaaaactgcttcataaaagcataggataggctttttcctatgctttttcgctttttattttaaaatgatttaattttttcggtattgatctgttttttttactattttgtgaacaatcaaggtagaatccaaacgcaatcagtggtaaaatatccttggaagcgtttttattacataattttgggcacagcgttcaaaagttatttcaagatagtgaattgatcacttgattatctaggttgggggtaatattcaaatgtttcaaaataatatgaaacaaagaatgaattgggaagatttttacggaccgaacctcggctatgcactggagctgtacgaccaatatgctgaagatccagacagcattgatccggatctgaaagatatgtttgacgaactcggcgctccgccaagccaaataaaagaggcatcgggaacaaaggaacagggacgcgtcaccgcagatctgattcaaaagatcgcagcagcagttaaacttgcagaagatattcgaacctatggccatctgaacgcttccgtcaatccgctcagaaaggatccgaaaaagagcgagctctttccgttatccgagtacgggcttacagaagaagaaatgaaagcaatacccgcgtctgtcatctgtaaagacgcacctgccaatataacaaacggcttagaagccatccagcatttacgcaatacctataaaagaaccatctccttcgagtttgaccatgtgcatgatttcgaagagcgcgcatggattacaaaaatggtcgaatccggagaactgttccggaaaaattcaccggaaaaactgtcagccgttttagaaagactgacggaagtagaaggatttgaacaatttttacaccggacattcgtcggtcagaagcgtttctcaattgagggattagacgcgcttgtgccggttcttgacgacattatcgcccagtctgtgaaagcgggcacaaccaatgtcaatatcgggatggcgcacagaggccgtttaaatgtgcttgcgcatgtgctcggcaaaccgtatgagattattttctcagaattccagcacgcgccgaataaagaccttgtgccgtctgaaggatcgaccggcatcagctacggctggacgggcgatgtaaaataccacctcggtgcagacagacagcttcaggatgctgaaaccaaaagcgcgcggattacgcttgcaaataacccgagccatttggaattcatcaatccgattgttgaaggaagcacgcgggcggcacaggaaacaagaacgcaaagggggtacccggttcaagacgaaacaaaatcgctcgccattttaattcacggtgacgcagcgtttccgggagaaggcattgtcgccgagacgctgaacttaagctctctgaaaggctatcaggtcggcggggccattcatatcatcgccaataatatgatcggctttacaactgaaagcgatgaatcacgatccacgaaatatgccagtgatttggcgaagggctatgaaattccgatcgttcacgtcaacgcggatgatccggaagcatgcctgtcagccgttaaatttgcggttgaataccggaagcggttcaataaagatttcttaatcgatttaatcgggtacagacggtacggccacaatgaaatggatgagccgtcaacgacacagccgatgctgtatgacgccgtcagaaaacacccgactgtcaagcggatctttgcggaaaaactcgtaagtgaaggactgatcagcgaggaaaaagcgcaaaacatcgaaacgacagtgacaaaacgaattgaagacgcctataaaaaggtgcccgccaaaaaagaagacgccgtacgggaaattgaattgccggaaccggtgtccaacggttttccagacgttgacacagccattgattttgatgttctccgcaagctgaacggcgaacttatcaactggccggaatcttttaacgtgttcggcaagctgaaaagaatcctggaaagacgtgcaaaagcgtttgatgatgaccgtaaagtagaatggtcattggctgaatcgcttgcgtttgcttccattttgaaagacggcacgccgatccggctgaccggacaggattcagagcgcggaacgttcgctcaaagaaaccttgtgctgcatgacagcgaaacaggagaagaatttgttgccctccatcacttagacgactgcgctgcttcatttacggtgcataacagcccgctctctgaaggatcggttctcggctttgaatatggatacaacgtgtattcgcctgaaacgcttgtgatgtgggaggcgcagtacggggactttgccaatgcggctcaagtctattttgatcaattcatatctgcaggacgggcaaaatggggacaaaaatcaggactggtcatgctgctgcctcacggttacgaagggcagggccctgaacactccagcggccgcgtcgagcggttcctgcagctggcggcggaaaacaactggacggtggccaacctgacaagtgcggctcagtatttccatattttaagaagacaagcgaaaatgctgcttcgtgaggaaatccgcccgcttgtgatcatgacgccaaagagcctgctgcgcaacccgaatacggtatctgaagtgcaggaactgagcgaaagccgattcaagcctgtctatgagcagtccggtctttcccatgcttacgaaaaagtgactcgcgtcgtattatcaagcggaaaagtgtcaattgatatcagtgatcacttcaacaaaatggaaggcgataaggattggcttcatattgccagaatcgaacagctgtatccgttcccggcaaaagatacgaaggagcttttcgccaaactgccgaacctgcaagagatcgtttgggttcaggaagagccgcagaacatgggggcatggagttatatcagcccgtatctgacggaaatcgcgccaaaaggagtaaatgtccaatacatcggccgaagaagacgatccagtcccgcagaaggagatccgacagtccacaaaaaagaacaggaacgcattgtatctgatagcttgactcgcaaaaactaagggggaaatgaaaaaatggcggaaattaaggtacctgaattagcagaatcaatctcagaaggaacgatagcccaatggttaaagcagcccggtgattatgtagaacagggtgagtacttgcttgaactggagacggacaaagtaaatgttgaattgacagcagaagaatcgggtgttctaaaagaggtattgaaagattcgggtgataccgtccaagtaggagaaattatcggtaccattacagaaggcgctggcgaaagttctgcacccgccccttcagaaagtgctccagccaatgaacaaacgaaagaggaagcaaaagctgaacctgctgcacaagaagtcagccaggaagcacaatcagaagcgaaatccagaacgatagcgtctccggctgcacgcaagctggcaagggaaaaaggaattgatctatcacaaattccgacgggggacccgctcggccgcgtgcgcaagcaagatgtggaagcttatgaaaaaccggcttcaaaacctgcggcacagccgaaacagcaggctcaaaaaacacagcaaagctttgacaaacctgtcgaagtgcaaaaaatgtcccgccgcagacagacgatcgcgaaacgattggttgaagtgcagcagacttctgcgatgctgactacatttaacgaagttgacatgacggccgttatgaatctaagaaaacgccgcaaagaccaattccttgagcaaaacgaagtaaaactcggtttcatgtcgttctttacaaaagccgtcgtggctgcattgaaaaaattcccgctgcttaacgctgaaattcaaggcgatgagctgatcgtgaaaaaattctatgacatcggtatcgctgtcgcggctgaagaagggcttgtcgtcccagtcgtgcgtgacgctgaccgcctgacgtttgccggcattgaaagagagatcggcgaacttgcgaagaaagcgcgaaacaataaattaacattaggtgagctgcaaggaggctccttcacgatcacaaacggaggtacattcggatcgcttatgtcaacaccgatcctaaacagccctcaggttgggatcttaggtatgcacaaaattcagctgcgcccagtagcgattgatgcggagcgctctgaaaaccgtccgatgatgtacatcgctttatcatacgatcacagaattgtagatggtaaagaagcggtcggattccttgttaccattaaaaacctgcttgaagatccggaacagctgttgctggaaggataatttgagacagacaaaaagtacactgcccttacaagcagtgtactttttttattgagagaaggggagaatttatatgaaaagctgttatccgcttgagatcgaagctgaatataatgaagaattgcattctatcactccggttcttctgcaagacgaacatgacacgatattaatagactgcggatatcccggttttacaaaccatcttcaagatgctgctgcccggcatggaatgtcgcttcattcattgacaaaaatcattgtaacgcatcacgacatagaccatatcggctcactcgctgcattataccgtttgcatccggatgtcagcgtgacagtacatgagcgtgaagcgccgtatattgacggctctaaaaaatctttacggcttgagcaggctgaatcaacgttttgttcattgccagaggatgcaaagccttatgcaaaacagttcatccgctcgcttcaatcagtcgaaccggctccagttcaccggacagttactgacggcgagctgctgccttggtgcggaggcattcgcgttgtagccacgccgggtcatacacccggccatatcagtctttatctgcctgccgaaaaaactatggtcacaggtgatgcggtcgtcattgaagacggaaagctgaaccttgctaatcccggctatacgttacatatggatgatgcggtccgttctgtgcagcggctgctcgattacgatatccgccaattgatttgttatcatggaggtttatttcagggggatgtaaaaaaagcgcttttgcgtctgtttcgtgatctgcagaataaacaaggataggagcggcagcagcctatcctatccttgttcagttatgaaaacggaatctttgccgtttcttcttcttcggcgctgtttttctcttttttcttagaccagtaggtggcaagaacagaccccgacagattgtgccatatgctgaaaattgcgctcggcacggctgacaaaggggagaaatgcgctgtcgcaagcgctgcgcccagtccggagttttgcatcccgacttcgatcgcaatcgctttttgtgaagcataatccattttgaacagctttgcagtcaggaatcctaacaaatatccgattccgttatgtaagatgacgacagacacaatcagcagtcctgattgaagcaaatgctcacgatttacgctgacgacagaggatacaatcgctacgatgccgattaccgacacgagaggaagcgcgtgcacggcttgtccgacctgttttttgaagaacagcttcacaatcaccccgaggacgatcggcaaaagcacggcttgcataatggaaacaaacagtgagccgaaagaaacggggagccactctttcgcaaacagcataataagtgccggcgttacaataggagcaagcaatgttgagatcgtggtgaccgcaacagaaagcgccgtattgcctttcgccaaaaacgtcatgacgtttgatgccgtaccgcccggacagcatccgaccagaatgacgcccgcggcgatttctgcggggaggcggagcccgattgataaacagaaagccgtaagcggcataatcgtaaactgggcagcgactccgatcacgacatgccaaggctttctgattaattctttaaaatcgtctgcttgaagagtaagccccatcccaaacataataataccaaggaaaatcgtcatataagaactgatccaagaaaacaaatcagggcaggcgaatcctaaaccggcaaagacgataacccacaagccaaaggtttggcccgcaaacccgcttatttttttcagccattccataaacacagctccttttacattcaatcaatcagtcagaaaatatgactgacttttctgtattccattataaataattttctgaataattcaatattaaatgtaagttttcaataaaattattatgtaaactaacatcttcttgactattcagacatatattcttacaattgatttttatactgaaatgaattgggagtgctgaagtgaaagaagctaatcaatggtcatctaagctgggatttattttagctacggccggctctgcaatcgggctcggcgcaatatggaagttcccttacgtagcgggaaccagcggaggcggcgcttttctgcttgtttttattttatttactgttttaatcggactgccgcttttgcttgctgaatttattatcggcagaaaaacacaaaaaaacgccgttgaatcctataaggcgctcgcgccggggaaaaagtggcactggatcggatatctcggaatcattacgtgttttattctattatccttctacagcgtagtggggggatggatattaatctacattataaaaggctttacgggcggcttatcgctttcttcgggatttgatacgttatttatcgataccatttcaaatccttatgcagccgttttcggccagctgctgtttatcgtgctgacgattttagttgtggcaaaaggggtgagcagcggcattgaaaaagtaagccaggtgctgatgccggctctgtttattctgtttattctcttaatgatccgctccgttacgctgcatgatgcagcaaaaggattaaaattcttttttatgcctgattttggcgcgatggatgccaataccattttatatgcgatgggacaatcatttttctcgttaagcgtcggagtgtccgtaatggttacatacagcgcatatttagaaaaagaagaaaatattgttcaatccgccgtatcggtgacggtattaaatgtacttgttgctgtgatggcgggagtggcgatttttccggcggtgtttgcattcggcctcaagccggatcaaggcccgcagcttttatttaacgtgctgccgaccgtctttaaccaaatgccgttgggcatcgtgtttttgctcgcctttttgctgctgtttttatttgcgacgctgacatcggctttttcaatgcttgaaattttagttgctgttttgtcaaaaggcgattcggcaaaacggaagcgttatgcatggatcgggggacttgctatatttattgtcggggtcccttcggcgctgtcgtacggaattttgagtgatgtttctatttttcaccgcagtatttttgacgctgcggattttctggtcagcaatgtcttaatgccgctgggcgcgcttttaattgccgttttcgtaccgttgaaaatcccgaaacagatgctgtttgacgaactgaaaagcggttccggtataaaacgaaaatggtttgcagtctggctcctattaatccgttatgtggctcctgtagccattattatcgtttttctgcacgtgcttggtattttttaaaccaaaagaagcaggcccccgttcaagacgggggcttttttaataaagcggccatatcacgcggtgcgcttgctcgaaccgtttctccgcctcccgccaatcaacgacattccaccattgatccacgtaagccgctcggtcgtttttatattgtaagtaataagcgtgttcccacacatccagcggaagcaaaggaatgacgtcccactggctgtagagctgatgcttctcagcggccaaaatctccagccgcccggcgcgcggcgcccagactaggatagcccagccgactccttcgacttttttcgccgcttgagaaaattgctctttaaaagcggaatagcttccgaatgacacatcaatcatttgaaagagcgcccccgtcggccgtcttttaccgtttggattcatcgaaaaccagaaaatactgtgcaaataatggcccgcgccgtgaaacgccaattgccgcccccaatgtgccactaagtcgtactgtttcgtctgtctcgcttttttgagctccagttctgctttattcagaccatcaacatagctctgatggtgttttgtatggtgaagtttcataatctctcttgaaatatacggttccagtgcggaataactgtaaggcagtttagggaggacatgcttgccgatcggcacataagctctgcgctcatccggctcttcgggttcagtaatgtcccggtaaagtgccgatgcctgttcgtaccattccgcctccgttaatccatcatcctgaagggtgtgaaaaatccggtcgatttgtgccgcgaagcgatcgaaccgaccttgctgaataacttgttccttcaaggtttcacaccaattcagcatctcggtttgataagcgtgccgtttcatttttcttcctccttttcactcattttcataaaagtgctgagcgcaagcaaagaaaacacatacgggtagctgtgatacctgatgtaaaactccttcggcaggccgattccggtcggatagctgaaagcggctccttcgtaatgccggttttcaataagaaaagatatgccttttgtgacggcttgatgatgagttttttcgtattgcagcaaagcttcggccgcccaagccgtctgtacaagcgtcccgtaagaaagcggaacataggttttctcttctgcgcttttacaggattccccccagcttccgtcctcgttttgaatggacttcagccagcggatcgcttttttcacggccgggtggttttggctcacgccgcaagccttcattcctgtcagcgctgcccatgtgccgtaaatatagcagacaccccatctgccgtaccacgatccgtcctcttcttgatggcggatcagccattggacggccttttcaatctgagggtgatcagaagaaagccccgcttctcctaaacagtgcagcacccgtccggttaagtcgcttgttgagggatcgatggcagcttcctcagccgattccagcggcagcaggcgaaccagcggatgattgacatttttctcaaaagcagagaagccgccgtcactgttttgcatggacaaaagccagctcagtccgcgttcccatgaggcgggataaagttttcgcggaatggctttgagcactgcggctgtgtcatcacaatcaggattatttgtattgatgtttgaaaaaccccatcctcccggttcagcatgcgggttgtgaacggcccaatcagcgactttcgtctgctgccgttcacgcagaaaccgggcggcgctggttatcatctgatcgttatctgagatgccgcttttcataagcgcatagttgagaagcgccgtatcccaaacggtcgacgttgagttttccaggtacggtaaatcgccgcaagacgtgagcaaagctttcgtgccggcaagtgcttttctgataacgagggagtggcgcgatacaccgagagcgagcaggccgtacaccataaaaatagtggcgctcgcatagctgtataatgtgccgtcttcttcgatccggtcaagcatatacgttttggccgtacgcagaccgagctggtgaaaagcggcaggaatctgcaaaagccgcttccagtgcgcgaaaagagaagagaggtctctgttctcgtcctgatcggaacgaagccatgtaaacggatttttagtcatatgccgatctaaatgcgcgagagacggaacgttgggatttttcagcgaaaatcttttgttaagcgtcacggccatcggtacaaaatgaatacgggcgtatgtactgaactggtaaaaatgcagcgggaaggatgggggaatgactaagaaagataatggcagatgcagcgcgggccatggataaaggccgtttgccgcaagcatccactttgtcatgaagtgtacgttgcgcaagccgccatttgagatgataaagcgttcggcctgaatcatatgcgcctcagaacggctatataaaccggaagccagcaagccggcatagccctgtacagtggcggtcacatttcctttccggtcatcaggatagttggcaaaagttccgtccgggcgctgtttagcgcgaatgccttctgcaagctcagcgatcagttctttatcattgtctccaagagaagtgaggaggaggatcagaaaggcgtttgtcaaaatcggtccttcaaaacaaaatgaccatgagccgtccgcattttgcgtttctcttaatagagagatggttttcttttggcggcttctgacgttttcatgaattgtgctcacactcgctcaactccttcagaagcatatatattcatatgtaaaaggcggcatgacaaaagaaagaaactgctgacaggcagcagtttcttgtttgattaatcttccagattgatccagacgcttttcacttctgtataattatccagcgcgtaagagcccatttcccgcccgaggccggattgcttatagccgccgaaaggagatgccgcatcgaaaacattgtagcagttgacccaaatggtgccggcttggagacggtcagcaatgtaatgggcgtttttcacattctcagtccaaagtccggctgcaaggccgtattccgagcggttcgcccgctcgatgacttcatctaccgtatcatacggaatggcggctaaaacagggccgaaaatttcttcttttgcgatggtcatgctgtcatccacatccgcaaatacagtcggggagacaaaatacccttcttcaaacgggcagctgccgcccgcgacagctttggctccttccgcttttcctttttcaatatatgaaagcacgcgctcatgctgttcctgactgacgagcgggccgatttgtgtatcttggtgaaggccggcgccttgctgaagcgatttcgcatatgaaaccatttcgctgacgacctcatcatatttgtctttgtgaatgaagacgcgggagcctgcgcagcatacctgcccctgattaaacatgaccccgtttaaagcgccgggaatggctttcttcaaattggcgtcaggtaaaatgatgttaggtgactttccgccaagctccagtgtcacgcgtttaattttttttgcggctttttccatgatttttttgccgatttctgtagaaccggtaaaagcgagtttatcgacatcgtcatggttggtcagcgcttccccggccgtctcgccgaaccctgggacaatattgatgacgccgtcagggaagcccgcctgatctattaattccgctaaatagagggcggtcagcggtgtctgctccgccggtttcaaaacgattgtgcagcctgtggcaagagcggcgcccattttccacatcgccataaggagcgggaagttccaagggatgatctgccccacgacgccgacaggctcatggcgggtgtaattaaaatatgagccggcgaccggaatcgtttgtccggttatctttgtagaccacccggcataataacgcatatgctcaattgcgagcgggatatccccattcgtcgtttcattaatcggttttccgttatcaagtgtttcaagctgcgcgagttccgttttgtgctcttccattaaatcggcaagcttatacatcagcctgcttctggaagcggccggcatagtgcgccattcgccgtgatcaaaggctttgcgtgccgctttcactgcactgtcaatgtcttctgtctgtgcctcgtaaagcgtcatcagcgtttctccggttgccggattcggtgtgacaaatgttgatcctgaagcgctcggaacaaattttccgtcaatataaagtttcttcgtgccctgtaaaaatgtttccagcctttttgtgatctgcatcgttaaagaactcattcgtaacaaacctcccgaaatttttttatggtctgttttgagcatcttgatgtccgcgcaaagtaagcgcatacagtcattttataataacagccccggtaaaatcaattgataaccgttattgcaattcacaagaaaaaacggctacaataagcttatcgattaagaaaaggagttttataaatgattcataataattggcagacaaaagaaagcgtcaaaaaggtcaaatgcgtacatacagatgcgaaaaaatacattgtcaaaaatgtgctgacgccgggtaaagagtatgaagtcaaaaatgaaacagaagaattcatttttgttgtagacaatacaaacaaagtcggaggcttctacaaagagtattttgaagaagtttaaagctgaatgaattcattttgcctgagccatactaaaaaagactacatataaaaggtggctgcaaaatgaaaaaaacagagcaagacaaacaaaataaaacatcagatcagcttcagcaagtgcaacctgaagaaggcaccgacacgacgatggaacaaatttcagatacctataaagaaggaacaattgaagatacggatcgttgatgttttgttgaaaccgcggcattggagaagccgcggttttttatggcgaaaataaaaaactgacttttcgaaaaaaataccgttttcttgaaaccttttcttccgttgaaccgtattacttcataacagcggcacctttcgcgaagggcttttttgatgaacgttctaaaaatgtaatctgttcgtaatggtttaaatgccgtctatgtcgtattcttatatagggataaagaacttatttttttatgattgtaataaaacaatagtatagaagcagaaagtggggttcttcattgggaattttttctgtcagcagatcaaccgacacaaaaaagctggaggctttgctcgttgagggagaacggatcgaaacgatttataaactgcgggttgaccaaatatgctttacgaataaacgagtgattttctttgataataaaatgttctccaaaaagaaagtgcgcgtatttcttccatataaaacaattgaaagcttcgccattcaagaagcggggatgtttgatccagataccgggcttgtattaatgacaaggggaaaaactttcgaattggaatttgcaaaagaaacggacttgactgaggttcaagccatcttaacaaaatacttatgcagttaaatatcacataaaagccatccgaatgcatgcggatggcctttttattatataatgcttgtttttccggagttcgaatcaatgagatccggatcagcaatagaactgatggggatataaatcggcgccaaatcaccattttcttcaccgaatccgtagttgatcttattggataaaaaataatcgatttgctgatacgggccgatcgtaatggaagaaccgcggtcgactgcatttactttaaagcctcctacatttaccaaaaccggcgaaaacatcataatgggcctccttttccggcagggattttatcgcatgcagactcaaaggcagatggagaatcaatttgatcccggtcatccactttgccgttcgtgccgatgaagccgcttgcatctccgaagttctgtccgtatccctgattctttttatcagaattctgccattccgccagtaaattttgtccgacattcaccgctgaagcattttcaaaggaattaattttcaacatgaaaatattaatattgatatatggagttggttgaaccacaggcaaacctcctttaatacaggtgtatgccggctgttatgaccgtatgcttagacagggggcgataaaaatggatttcgataagatgaagcaatggatggaaatggcgcaaaacatgtccggcggcgacttttggaaaaacgtttttgatgatgaacaactgaaatcatttcaaaacggccattctcattttccctttcaacagggagatgggcaaatgagaagaaatgaagatgcttttcctcttatagatattgtggaaacccatgatgagctccaatttttactgtatctgcccggctaccggaaacaagatgttcagctgctgtcctacggagaatatatcgtcgtaaaaggcacgagaaaatccttttttaatgaacaggattttaaacagaagaccggaaaatacggcgattttgaaaaaaaactcgaccttccgcattccgctcagggaacaaagggaatgcaggcggtattcaaagacgggattttatatatatcgattgctaaacatctgggggatgcaagccagatcattatcgaaggctgatcttgtttgctgtgccatctatcagatctgaatcatcgatactcgtgatagggatgacgacaacggtgcaatcaccgttttgttcaccgtacccttcatttcttttattggctgctgtgtttctcaccataacggaagagccggtgttaaaagctgctccgccgctgattccgttcatttttatatactcaaaattgataacggatggaaaaaacatcatgattcgcctcctttttgtatatcatgtttatatattcgcaatgcggggcgcatagaactttccaagagtgacggggaaagaagtgattttctttgaaaaaaataatgaaagagattttcaaaaaagtgtgtgaagaagaattagaccggcttaagaaagtggaacaacagcttgatgagcttcaggataagtgtcattttgagccgcagacggtggaaggggaaaaaacatatgtccatattgagcacgtcaaagtggacaaggttgaatacaatattgattttgaaaatctgagtatagaagagctgagcggtatgctgaatatcggcgccacttaccatacaccggcgcacaggctcaaacaaacctgcgctgaagaatttggggacaacccgcaaaatgatgctgcgaaagaaaaaagacggacaaagcagcagacacccaatgtcaccatcagggggagaaagcattgaccccgttgtttcagcctcctttttcgagggtatgtattaacagatgcagcgaagaatacagacgaaaaaggagatgatgaatatgtcattatcaaaagaacagcaggacagcctttatcataaattaatcgatttaaaggaaagtcttcagggagaatcaaaagaaaatcattcaatgagtgaagacacaggagaactgtcgaacggagtagataaccacttagctgatcacggaagcatttatttggacagggtcacgaatcagacgcttgacggtgtcgatcagaatcttttagatgaggtgaacgccgcgcttgaacgaatggaaaaaggaacatacgggatttgcgagaaaacgggaaaagaaattccttatgaaagacttgaagccgtgccgtacgccagaatgaccgtcgaagcgcagcgagaaacagaaggggatgtgaaaacagacgctccgtcatatgaaagggaatttcacgagcaggtgaaagacctctcaaataaagaaaccgttgatcaaaaaagctcacaaacatacgaaatccttgatcgtgagcaggattcacaataatagcagcaggtacattcatatgtacctgtttttttattccataaaaaatctcaaaatcgaaataaaatcattgactttatataaaaaagaaagtaacatactatttgtaagtaaatattaaaagattaccgggaggaatttagaatgtctcaagtattatttgtaaaatcaagtgatcgtacggctgaagaaggcgtatccgtaaaattatacgaagcgtttctggctgcttataaagaaaacaatccgaatgatgaagtgatcgaacttgatcttcataaagaaaaccttccttacctcggaagagatatgattaacggaacatttaaagcttcaaaaggaattgaaatgactgacgaagagaaaaaacaagcgtcaactgctgacatttacttaaatcaatttgtcaaagctgacaaagtcgtgtttgcattcccgctttggaacttcacagtgcctgctgtgcttcatacttatgttgattacctgtctcgtgcaggagttactttcacatacacgcctgaaggccctaaaggtctgatgggagataaaaaagtagcgctcttaaacgcacgcggcggcgtatattctgaagggccgatggcatctcttgaaatgtcattaaacttcatgaaaaccgtcctcggtttctggggtgtccaagatcttcacactgttgtcgttgaaggccataatgctgcaccggataacgctcaagcgatcattgaaaaaggactgcaagaagcgaaagatctggctgcaaaattctaattttcattaactcttgcgcccctacagggtgtgagagttttttctattatagaagaaactggcggctgctttcgatctgatcttatattgatatattgatattttgtcgaaaaaacaatttttatgtagaataaagcatttttcacaaagaaaaaaggttttctgtaaaagaattaaccctcttgccaaaatacgactgatggtgtaggatataagagaagctacattgttcgtattgttaattaagttttaacctttaagctgtaatagggagttttatatcgaagccggaatgtcatgcctccattgcagaggacgacaggaacgcttctgcaaacacccactttgaggagtggtggtttaaaactttcttacttgcgtacggcatacgtagcgaaagccatttcccttgcggagatggctttttattttgaattgctcttgagcagcgtactttatcagtatgataaaataaaagaatcaaagacaaagtgaggttttacaagatatgctggagaaagcccaatcccttctggcgcattattttggctacgacagtctacgcgcgggccaaaagcaggcgatacaatcagttgcagaggagagaaaaaacacggtctgcattatgccgacggggggcggaaaatcaatctgctatcagattcccgcactgctgtttgaaggaaccacaatcgttatttcccctcttatttccttaatgaaagatcaagtcgacgcgcttgaagaagcgggtatcgcggcagcttatatcaacagtacccagacaagccgtgacattcatgagcgcctgaccggtttgaagcaaggggcttaccggctcttttacatcacaccggagcgtttgacttcttctgaattcattcacatcctgcagaatattacggttcctcttgtcgccattgacgaagctcactgtatatcgcaatggggacatgatttcaggccgagttaccggaatatcgaaatcctttttaatgaactaaaagaaccgcccgtcatcatcgcattaacggcgacggctacgcctgaggttcatgatgatatctgcaaacagcttcatattaagaaagaacaaactgtatataccggttttgccagagagaacttaacgtttaaagtagtaaagggcgaaaacaaagaccggtttatcgagcggtatctggaaaaaaataaacacgaagccggcattatatatacagcgacaagaaaagaaaccgaccgtttatatgagaaattaaaacacagcggcatcaatgccggccgttatcacggcggattggcggatgatgacagaaaagaccagcaggagcggtttcttaacgatcagatacaagtgatggtagctacgtccgctttcggaatgggaatcgataagagcaacatcaggttcgttttacacgcgcagattccgaaagatatggagagctattaccaggaagccggacgggccgggcgcgacagtcttaacagcgagtgtgtgctcttgttttcgccgcaggatattatggtgcagcgttttttaatagaccaatcggccgctggagaagaaaaacaaaagcaggatctcaaaaaactgagacagatggtggattactgtcatacggaagattgcctgcagcggtttattctgaagtatttcggcgagaatgaggcggaagcttgcggagcatgcggcaattgcactgatacaaggaccgcccatgacgtcacaaaagaagcgcagatggtattgtcatgcatcatcagaatgaatgagcgcttcggaaaaacgatggtggcgcaggtgcttagcgggtcaaaaaataaaaaagtgctggaaaacggcttcagcagcctgtccacttacggcattatgaagcatcaatccgcagcggaaatcagtgattttatcgaattccttatttcagatgaatatatcagaatggcggacggcacatttccgacgctaatggtcacccaaaaaggcagggacgttctgcttggaaaaagcgcagtcgcgagaaaagaagccttacaggccgccgccgttaccgaaaatgatgaattatttgagcttctccggcgtctccgcaaagaaattgcagctgaacagggtgtgcctccatttgtcgtgttctcagatcagacgttaaaagaaatgtcggcgaaacttccgaaaacagatcaggatcttctttccgtaaaaggggtcggggaacaaaaaagattgaaatacggagcggtttttttagaagaaatccgaaattatgtaagagaaacagagtgaaaaaaagtttttttagaaatttgcacattgtgtttttcattcgcgccggaaaaatcagaagcttgaaaacccttgctgtatcaaggtttcagcaagacttaccaagcgagagaaatgtttcatgtaaaggaactgtaatctaattcaaatcgttttgttattgaactgacattttcatatgttacgatatcacctgttagccgccaataaaaagctaacaagggaggatttacttatgaagaagacgattatgtcctttgtcgcagttgcagcaatttcaacaactgcatttggagctcacgcttctgctaaagaaatcacggtgcaaaagggtgacacgctctgggggatctcgcaaaaaaacggagtgaacctaaaggacttaaaagaatggaatcagttatcttctgatttaatcattgaaggagagaaactgactatttcttcagtagaaacaaccacatctgggcagtacacagtgaagcagggcgacagcctctggaaaattgctcagaaattcggaacatcagtcggcaatctgaaaagcttgaataacttgcaatcagatataatttacgcaggcacaacgttaaatgtgaaaggtcaggctcaggctgcacagccggctcaagaagccagccagccgcaaactgaacaaaaaccagctgccgagacagaacagccgaaacaagaagctgtcaaaaacgagcagcctaaacaagaacctgttcaagaacaacaacctaaacaagaagcgaaggctgtcgaagcaaaacagcagcctgttcaatcaaatacaaaccaacaagagcctaaaaagcagctgacaatgactgcaactgcttactctgctaacgacggcggcatttccggtgtaacggcaaccggtgttgacttaaacaaaaaccctgatgcaaaagtcatcgcggtagaccctagtgtcattccgcttggctctaaggtttatgttgaaggttacggagtggcaacagcagcagatacaggcggcgcaattaaaggaaataaaattgacgtatttgttgcaaagaaaagtgacgctaacaactggggcgtcagaacagtaaatgttaaagtattagactagtttcatatagagatgaagaacacaaggcgaaatgctttgtgttctttttttcttcccttttttgactgtatataatcgttatatgcggaaaaagaaaaagcgtttctctaatataataaggaatggatgtgaaaacggaatctgaagggatgtatgaatctgatggagccggaatttatatgtttatggaatgccttcacagaatcaccggtgtttcaagcaggtatatgcaccgctttcgccattgtgctcgttatcggactgtctatgcctgctgtcaggctgtttcaggcgcttgacagagggagaggaaggccagccgttattgaaaaggtgagacgtactggcgtgatgaagaatggcaggcacgagcttgtgcttattttaaacgtaaaaaaccaagacggaacgcatgataaacgtgaactgacacatgccgtatataatgaagagatcagccgtttttatgaaggagcttccgtatgggtgacggcagcggccggcggacgaatgatgatcgctccgcgcacaccgcggcataaggcgtcaaaataaaaagacggggcgtttttcccgtctttatgtattaatgccgatcgatccatatccgtccgccttctgagccggcttctatcctgcatgttcctccgatcgggaatgtcatcaaaggggaggtatggccgaaatcagcatttgcgataacaggcatggatgacagttcttcttttgtacggatgacggcacgcagagcctcctcagacacatttgaagcatgctggaaacgtccgatgacaattcccttcacggctgaaaaagcgggaaggtggatgagtgactgcaaatcccggtcaaacatatgaatgtccgacatataatcatcttctataaacagaatcacttgttccatctccggaaagtattccgtgccctgcagaagattcagcgtgcatagatttcctccgatcagtgttccttccgcatatccgggttgaataacgagcggtcccggattccgataaaaacgtctgtcctcctggttcaaataccatttatcatcactccactcggatgaaggctttacctcatacgggttgtcagaagcacagcaggccaagaaagagtcaatcgtatagtccagcccttttttcatggcaaatgaagaaaagtggggaccggaatatgtaataaggccggttttttgatatatggcatggccgagagcggtaatatctgaatagccgcaaaggattttcggatgccgcttgatgttttcataatcaagatagcgaagcagctgatttgattggaacccgccgagtgtcgtcaaaatcgctttgatgtcaggatcagcgaaagcttcgtgcagatcccgtacacgcgattcaatggatgatgaatcaaattcatttatttctttcgcatgctctgaaaaagagacacaaaagcccagctcctccaattttgtcttcgcggcatttatattttcatctgacataacggacatgcttgtggccggagacacaatacgaatgccgtcaccttttttcaatttttccggatacaaaaaaaaccctccttaaatggtttaatctattacaccatattaacgagggtttatctatcattttttacaggtcgacccatttaatgccgcctgattgcgtatcattgtcaatccagacatcaaagtgatgcttttcataaaaatgaatgagtctgtcgacatgatcccaatcacgcttagcgatgtcgcccgtcactttcgggatattctgctctctggcgatatgttttaaaaatttcatgcagatcgagccgtagccgtggttcggcgggcctttaatgtccccgatatgaatggcattgtcataataagaggcgatcagtgaaaaacagcctcttccccggtaggctgattcacaatcagtcagcataatcttacatgtttggccatcatcaatcgaggaaacaatgatccaatcgtcattgttcgattgatcaataccaagcactcgcgcgtcttttgatacatctatcagattttcccgcattctaaaaatctgaaattcaagtttatgaagctctttttccagctctttctgatctctttcttctgtagtaaacaaaatcatactcctttcacagcgtaaaagtcttagttaaacacaagtatccattgtagtaaatgatgtcttggtttgtaaatgggttttgcaaaaacttttttagaaaagtctgccgtttatatgtggattgacgtttttaaggcggtgcggatagggaaaggaacagtgagcagcggaaaaaggaggaatctataatggcaattgactcactcatcggcaaattgaagtacgtaatgacggaatctcctgataaaatgctttccttatatgtcaatacggatatgagaaatccggatcagcaggggggagagtggaaaatcgccttgaaaaccggttttcggagattaaaagagtatctgtctgccagtgatccggaagaagaaaaatctctcgtccgcatcatggaacgtgtctatcaatatatcgatgggcttggtaaagagatgccgcgaagtctcgtattttttgcatcgggagaaggcggtatttgggagacgattgaattgcaggtgcctgtcgaaacacgattttattgggaagagacggctgtccttgatcaattagaacttcttcgtgaacaatttccgagcacggcttttattctcacccagcagaatgaagtgaagatcatagaaaccgtactcggaaaaattgaaggggtggagcattatcattacgacgtcatcaatgaatcgtggaaaccgcaggatgtaagcggaaaccgctccgcgtcgatggacgaagacgctgccaaagcccacgtcgaagaaaaccaaaacaggctgtataaacgattggcttcaaaccttgatcaaaaggccgcttcacaccaatgggagcgtctcgtaatcgcaggggacaaagaaacagccgatattctcgatcagcatatgaataaaccgatagatcggatcattccaaaaaatctgttgaatgaaaacgaacataaggtgatagaagaactgttgaaggaagcataatatgacgaaaggccgggtctcaaacacccggtctttttagggcttaagtttgtctaatttctgacgaagcggacgaaaccgttgacatcaaagctgaattctcataccatttggatagtcagtaaaattgagagaggtcataagatgaatcagacagaaaacaaacctaaaagttataccggtatcgtgctgacattgaccgttctgatcaacgggttaattgcggtgctgttttttatgccgaaatcgggacaggtcagcattgccaatattcatattctgccgatgttaaatgccatttttaacagctttacttttatctttttgctggcagcgctctttatgattaagcaaaaaaatattcaagcgcataaacgttttattttggcggcgtttacgacgactctgctgtttttgatctgctatgtcgtataccactctgtggctgaaaatactttattcggcggccacggcatcattcgggggatttatttctttattttaattacgcacatctgtctttccgccgttatcgtgccgcttgcgctgtttacgctgatcagaggattcagcatgcaagtggagcgccacaaaaaaatcgcgagatggacgatgccgctctggctgtatgtcagtctgacgggtgtcattgtatacttaatgatctcaccgtattattaaaaaaagccgtgctctgcgcggcttttttctattgattgaaaaaggcgcctcatcagggcgccttttactcttcaagcgtttcaagtgttgttacatttaaggattgttcaacggtttttgtttttgcttttactttttctgcgtacgtgtaatcaccatagcagtagggataacggaaattgtctttgttccctccgcaagtgtaaagtttcggattctttttgacctgctgctcggagtattgttttgccagttcctcagtatgcgatcctccatgttcagccacgaaatcaatatagccggctcccatgttgtagctttgtataatcgtatccaagtctacgccttttttcttgcctgtttggtacatgagagtgaattgtttgattccctgtttgatactggtttgagggtttttaatctcatttcgctttaaacccagagattctgaagactgcatgggatcatttcctcttccttttgactcctgatatatcatgccgagtacaagcgatgtatatttggtgagtcctttttcatccagctcgtcttcaacaagcggtttgtaatctgtcagccgttcaaggacgatcggcttgacatcaaacggaagacttttgagccattcattatttgaaaatagcagaatgaggaagaaggaaaccatgacaaaaacacatatcatcataagacccgcggcagcgaaacagccttttttctttttctccactgtgtttcaccctcaatttcaggagcattatgactttttcattatgacacagatgaatgcgcgaaaccaagcggaaacccgtatttgaaacataaatttaaaataacggttcttttgtcaggcgcaggatgtatctgcatcaattgacatttggtataattgggctacttgagaaaagaagggtgaggtatatgactgaatttcacgaatccggaaacaaaaatgaccccgctgtcgatttagatgaggaaactttatttttggttgcccagacttttaaggcgctgtctgatccgaccagaatcagaattctccatttgctgtcacagggtgagcatgcggtaaatgatatcgcagaaaagctgaatttgctgcagtctaccgtttctcatcagctgcgttttcttaaaaatctgcgcctcgtcaaatcacgcagagaaggaacatccatctattattctcctgaggatgaacatgtgttagatgtgcttcagcaaatgattcaccatacgcggcacgattaaaaaacatccctgctttttagacagggatgtcagccgtactgactgttattggtttggtctctgctcgtttttaaaacataaaaagagaagccgctgtaatacactgcgatgaaataaaagatactgatggtcagcggatcggccccgaccgtttggctgtatgcctccggatgggtaaagtccgctgtgatccggtaaatttcaataacgcgataaacaaatctcgataggaataacgttaatagaataagttcaatccacaggtgagtgcgaaaatacatttttccgcggcgttcttcaaaagaaatgttccgtttagcaaacaggaccagaagccagccgcaaaaagtgccgaatataagatggccgtataaagccgggtgtgtgatgctgaaaaacgccagagctgcggccagcaatgaaaacaaaatcattcttgtataaagccagcggggtttcaaaggctgaaagccgacggaccgtttcacctttttatacaaaaaaaaggcaatcattaagacagggcagatgctttgaagtgtgatatgcatggtgtggaactccccctccgttgagtagtgtatgcttatccggctggttttagtagtctgatttattcgcaggctgaaagcatcttttatcacagtatgcacgtttctttttttttgcataagagaagcgcccgcgcctttttcaggatttaaacagaaaactcttgataaactaacggtattagttataataaactaatactattagtttttagggggatcttgatgagaatcttacaatacggaaccgtttggcagctgactttttttcccgcgctcttcccggtgaattgttatttggttgaagaagaagaaggagtaaccctgattgacgccggactgcctaacagtcataaaggaatcaaacaagcattgcggcagcttgggaagccgctgaatgacatattactcacccacgcgcacggggatcacatcggttcgcttgactcattagctgcggaatttccggatgcttccgtctgtatttctgagcgggattctttcttgctgaaaggtgacacttcattatttgagcatgaagcacaaacgccgataaaggggggagtgctgaaaaatgttcgaaccgaacctgatcgcctgctgaaaggcggcgagcggatcggatctttacttgtcatttccgctcccggtcatacgccgggaagcctcgcttttaaagatatgagaaatgatatgctgatcgtcggagatgcctttcaagtacggggcggccttgctgtttcagggaagctgaaatggaaatttccgtttccggcttttgctacgtggaataaagaagaagctgtaaaaacagcaagaacacttatcgctcatcaaccaagcagtctggccgccggacatggaaatgttctctgcaatcccgttgaaatgatggctgaggctgctgaggaagccgaacgaagcctgccgggaggccgatcataatgtcaccgagagtcggaatgagccttgacatgatattgagagccgcagcaggcatcgctgacgaaaaagggctgaacgaagtgacgcttgcggctgttgcaaagtccttaaacgtaaaaccgccttccctttacaattttgtcaatggccttcaaggaattaaaacagagctggctgtctccggtttaactatgttatatgaaaaaatggcggcctctgcagaaggactgacgggcgaaacggctttgcttgctctcgccgatgcctatatcaatttcgccgaagccaatcccggattatatgacgcaacatttcaaaagataaaagacggccggattgagaatctgtcaagcctgcttgtagagcttgttgtcaggcagctgacagctaacggatatgcacagtctgacactgcgattcatgctgcgagaggactgaggagccttcttcacggatttgccgtgttgagaaaacagagtgcatttgaattaaccaaatcaattaaggaaagccggaagtttgcagttgttgcttttctaagaggtttgcaggagagagaacaataatattattatgtaaactaaataaaaagacgtatcctgtaaaaggagggacaaatggattcattacaacatatcatttgtgagcggcgcacctattcacatatttttgattctcatgcacacacatactgccaaatgctctttccgctcgaaggacagctggacctggagacagaaagacgtaaaatcagattaaaacctgatcaaatgttgtatattccgcccgggcatgaacatcggttccgttctttggagcgaaatgaatgtctcgttctcgacataccggcatattttttcaaaggttcatttgcccctggcgttctgaataagcttgatcctttttggacatcgattcggtttctgctgacagaagagacaaagcagcagtcggctcattcattgagtctgcttgcagaatatattgctgaaaagatacaagaaaaccgtacaaatgattcaattgcgtatatccgccgaaatctctcaaagacttttacaattaaagagcttgccgcaatggaacattaccacccggcgtattattccgactggtttaaaaagcagacggggaaaagcccgcaagcttatattgctgagctccgaatgaagaaagcggaacaaatgcttattgaaacaaaatgccggctgacagacatcagtcaggaggtcggctttcaaaatttgtcttcctttaccagatggtttgtcagacataagggaataacgccgcgcgtcttccgaaacacctttcaatctgataaataatcctgaaaatcggttaaataaactgcttctttttttggtatcatgattgtaaaaaaggagtttttgatatggcagtcatcgaagattttatcaagcttgatcttagaataggaacggtcgtaaaagcggaagtattcccggaagcaaaggtgccggccattaagatgacaatagatttcggcgaagagatcggcataaaacaatcaagcgcccagattacaaaacggtacgaaccgggtgatctgacgggcagacaggttaccgctattgtcaactttccgccgcggcggatcgccggatttaagtcagaagttctcgttctcggcggcatcccggaaaaaggagacgttgtcctgcttacgccagagcagacagtaccgaacggaacgaaaatcggataataaaaaaagacgtttgcagaagcaaacgtcttttgcgtattgaggcgatacaccacacgccacattcgtgtgtgccgcaagggcatgtgcatcggcttacacaattcagctcatcgctatatcaatatagcatggcgggtgcggaaatgcaagagattttttaatatatgttatatctgcctttgttttgccgatccccgatctttcgtgtaaggttttctttgaaattttatgatcttgaataaagcagttcgacaaatgcaagagattcatctaatcttatatcctatggtaaaatttagacagaaagaagcagaaaggagccgtaaatgaaagtatttgaagcagcctcgttcatttcagccgcagaaaagcgggcaaaacaatacgatcagattagagaacaatttatcaatctcaggaaagcctatcagggaatggctgacttagacgacagtgagttttcaggcaaaggtgctgataacatcaaagcattctttcaagaccacgccggcgtcacagacagctggcttgatctgatcgatatgaaaatcgcgtttcttaacagtattttaggaaaagtagttgatgccggattagccgattcgtttgtggaagagtcctttttagaacacgagcttattcatgcgaagaatcaatcacaagccatcatgcaggagcagcggaatgaactcaaggacatcataaatgaaatcagcgatatcattcatcttgatgttttctctacagaagatgtcgatcaaaatctggaatcagcagacaaaaaacgggacgataccgtaaataggctcggaaagcttgatcacgatctaacgaaagaatacgcagaaaccgaggcaaatgaacatttcattcaggcagactttcaacagctccaaaacgctacgggcaaaggaaaaaacgccactccgcttcattataacgccaaggcatacagggaaagtgacatacataagaagaaaggcgagattgcaagacattcagatgcttatttgacgattaaaaaggaagaagcaaaagagcgggaaatcaaggatttgaagaaaaaactcgccgacggtgtaaccgacccggatgaatatttagaaattgcgaagaagatcggctatgaaaaccttgaaccttcccagcagcaacatgtcatgcagcttgaacaagcaaaacagctggaagaagccggagaagtgacttgggatatattaaaaggggctggcgttggtttatatgatgttgggaaagacacggtaaccggtttatgggacttcataaccgatccgggagaaaccttgtcagcactggggaatgcagtacttcatcctgttaaaacatatgatgctgtttcagcagcaatcgaggaatcgtatcaaaaagatatggtgaacggagatgcttactccagatcaagatgggtgacatatgcaattggttcagcagctgtggctgtcgtcggaacgaaaggagcaggagccgttaacaaagctgatgcggcggggaaagtcataaacaaggcaggacaggcagggaagaaaattaaagacgttaaacttccagaactgcttccttataactctaaatatgatcttgctctgtcgggtgacgtaccatacaatgtggttgacagccaaaaccttaaaaatcaacttttgaccaatgcaaagaaaatcccggatggaacgagaaagccgtttactggtcaagaaataaaccttccttggttaaataaagaaaagtatggtgctgttgaaatagacggcaaagtaaaagttaaaggacaaattagagatgtaagccgtagagtctataccttaaaggacattgatattaatcaaaaaactccaaaaggaaaaaccaacctggaattaatgaaagatggtaagtctccttatgctaaagacggaacacagattaacttacatcacctcatacaagaagaaagtggaccgttgcttgagatacctaatagtttacatacaaagtatagcgacgtaatacatggccttaaaggtaatggagaaagcttccggaatgatgtttacctggagaaacagtacaataactttaagacaaggtattggaagtggagagcaaaacaatatgagaaagaataaggggttataaaccatggatttttatttgaaagtaaaagaattcatagctgataatgcaaaagaaaaggattttacaggtgggattaaagaagataaaattttaaaaattgagcaagatcttcaagtcacgctgccggatagctacaaatggtttcttagaaactatggttctggcggggtttatggaatcgatttattaggctatgattttggcggtgcttcagttgtagaaacaaccagggaatatcatgaatataggggattgccaagtggcttagtagtcatagaacatgttgatttttttgggtattgtttagataccaataaaatcaacagtgaaggagaatgtccagttgttatttggagtgaattcggtggctataaagaacttaattctgcccattttataaagttcttttatgaaagacttcatgagatgaaagaaaactgggaagaagatgaagactgggacgattaataaaaaaaagctctcttttagagagcttttttcagattttcaatttttaacaggcttaataatgagcaaacaggcattactcaaaatactcgccgcgcctatccaaagcagccattgtgttgcggtcagccatgaggcagttaggataaagagtccaatggcaattgatatataattgccggctcggtccagtttacggttgcaatgaattttatatttagcatgagaaataaattgatcaattttatctttcagctcatagcatttttccttcattttatcctctgtttcttttacttttcgataaagcatattattcatcgtctgcactcccatatcgccgttttgaaaattcagccatgattttttcttcatagtcatctgagatgaattgtgcctgatcttcaactttcaaatgtgctttttcttcaaaaccatcctgttcttcaccatcaaaacgataaagtttttgcaatagcctccagaatgtttcaatttcatcagttgtgaagtcatgaaacatatccgctaaaaaataggtggatttttctgaacaggaaattaacgctttttttccttcagcggtaatctcaatattgattgcacgtttatccagtttgcttggcacagtgtgaacatatccttttttcgcgaggcttgaaattaatttgttagcggtttgttttgttgttcccagctttttagcgatattcataagtgtggtatcttccgtgggtaaatgggcaatagcaataagagtcatgtgctgtcgggaagtcaacatttctaagtattcgtccccccgagtctgcaccttattgacaaccgaaaataatgatgcgtaactttgttgcataaaatgcagttccttcattagtaatttaatatccataagttatctcccatctgaattgtcaccatgttgacaattacaatatacatcacaaagggaaataagtcaacatggtgactaatagggacgggtacggctgttttcaaaaatgtcacaggcagtcggagtgtttacaaaaggggaaataagtataataaatgcgaaaagggcattaatccaaagtgagaaggtgtttgacatgcagaaagtgaactggtcagaacggtatgaatggttcaataaacaagatgaaaaagacgggcgtttaatggcgctccttcgtcatgagcttacatatgaggaagtcatacggttatataagaaagggttttatttgaaatctaaagaaggggatgtttcgttacgtaagaacgatatctgtcgtatgtttggggttgaagagaggcagggcggcaaatcttaatgaacgggaagagaaaaaactcttcccgcttttcatagcagctgttattctttttccagcatggaagtcagccattctcttaatgccgtcttctgcacataccgctttccgtttctcgtgatatgcggaatgtcagaggtgtcaggcacgatttgtttcgcttcttccttggttactcctaaataataaccaatataatagtgtaaatctttttctttaatgagaatgtggtcagtgtgttcatgaggatcaggtgatttaaagtttttcaatccgtctcctatgaaatatccggctaaagcgattccgatgccggtaatgatatccatacagcaaacctccaataaacgtaatcattttttatacggtgaagccggccgaaggattcagccttcagcaaaaccgccgggcgtttattgcggacggttttgattgctgagcttttccacctgcacctttccggagaagaaaacagcgcctccgcccatatccgccagccgatcgggcgtgagcgaattgacgagctgttttttatcatccatatcggcccaaagaccttggctcaccgcaacgccgggaagcacctgttcgccgaccgaaactgtcaattcgcactctccgcggtgattccaaactctaacggtttccccgtcttctatgttccggcgtacagcatcctctctatgaataaaaagctttggcgctttttctaattttacgtgttttttattatttgaaaatgttgaatttaaaaaattatgattcggtcccgggacaaataaaagcggaaaatcgtcatcgctctcaagagggatgtgtgtcggcagcgccggataaccgtcctgtttcatcttttccgaatataattcaattcttccgctaggtgtcttgagctttcccggaaaaagcggttttttccgtttggctttcatgaaggaatggcgtgagagcgcttcgtaatcaatatcctcgatatacggattgtcgggaaagtccagcgcctgtctgatcaattcttcatcggaatcctgaagctcctgctcggtaaatcccattgctccggcaagcagacggaacacttccgtattcgatttgctgtccccgtagggttcgatcaccggtttttgcagctgaataaaatgatgccagtaagacgtgtaaaaatccgtgttttcaaaagcggatgaagcagggagcacgatatccgcatatttggcggtttccgttaaaaacagatcgtgaacgactgtaaataaatcctcccgcagcaggccttttctgactttattcgcttccggcgcaaccactgcgggattcgtaccgtaaataaacagggagcgcacggacggttttgtttctaaaagaacgcttccgagcctgttcatattaaatgatcgcggcttccgtccgtaaagcagatcaggccgctggagcgcttgtctgttatagtttaataccgcgctgttgtgcttgattgcgcctcctccggtgttgagccactgtcctgtaacagccggaaggcaggagacggtgcggacgatcattccgccattgtcatggtgctgaatgccgtttccgatcctgataagggaaggggaggtttccccgtacattctcgcaaggcgtctgatatcgtcggctttaacgcctgtaatagcagaaactgtttccggatcatagtgtttaacatgcgcttttaattcttcactgccttcggtgtattctgtgagaaatgcttcatcgtgaaggttttcgtcgaataagacatgcatgataccaagggcgagtgcggcatctgtgccggggcgaatgggaataaaccaatcggcaagccggccggtttggttcttatgtacatcgataacgacaatcttagccccttttttccgggctttttgagcaatcatgatttggtgcatattcgtgctgatggcattaattccccaaaaaataaaaagcttagcatgtatggtctcctccggatcagtacccgctccttctcccattgtatagttatagccttcagatccggctttgctgcagatcgtccgttcgagatgactcgctccgagacgatggaaaaaacggcggtccattccctctgccgccagttttcccatattgccgtaaaagctgtacggaagaatgctttccgctccttcttcggcaataagctctttccagcgcgcactgatcgtattgatcgcttcctcccaggaaataggcgcaaacgcggcttcaccttttttaccgatccgttttaacggaacggttacgcgtttctcatcataaatacgctcagccatgtgtctgactttgttgcaaatattccctgatgtgaccgggtgatcggggtctccctgaatgttaacgatttttccgtctttttttgtcacaagcaagccgcattgatcgggacagtctagtgagcataccgacttaaagaccccgttcggctgttttgcagcagaattcatagcccatttctcctctttgtttatattgtaagcattataacatttcaaaatcgaacgtcaattcagaaaaaaagtgttgacatcacggaaagacttttctatgatgagtttattcttttaaacagcctgacaatttcatcattttattttctatccagagaggtggagggactggccctacgaaacctcggcaacatttattgtgccaattccagcaagcgtatgcttgaaagataggaaagaatgatctatacatatttgtgcgcttcaagtgcataaagacggtatatgaatctctttccttctttggggaaagagatttttttatgaaaaaatttatgtgaaaaggatgttttgcaccatgacggttttaattaccgcaccatatcacgacgaggggctgaaggagctgactgagctgttcggccggactgtgcaccggccgtggaagaagcacggccgggcctatcgggaagatgaattgatccgaatgattcaagagacaaacgcgtcggggcttatcactgaacttgatgaggtgtctgagcgtgttattgacatattgcctgattccgcttttatcggtgtctgcagaggaatgccgtctaatgtgaatattgcggcggcgactaaaagaaaaatccccgttttctttacaccggcccgcaatgcccaggctgttgctgaaatgtttatcggaaatgtgatttcatttttgcgtcatacgtattcttcccatcaatggctgaaggacgggaagtggaatggtgattatttgcaggcttacgtcaaattcagaggaaatgagctgacggggaaaacagtcggccttatcggtttcggagctgtcggacagagaatcgcccggctattggccgcttttgactgcaaggtgctttactatgatccatttgtccgtcatgaaaaccgggagtatgaaaaaacgacgattgaacgggtattttctgaaagtgatattgtttccgttcacttgccgcgtacagaagaaaccatcggccttatcggcgcccggcactttcaattgatgaaacaggaagctgtttttgtcaatacgtcaagagcggcggttacagacagggaagagctgctgcgggtgctgaaagaacggcagattaagggagcgatccttgacgtgttttatcacgaaccgcctgaatcttctgattatgaattgatctctttgccgaatgtgttagcgactccccatttagcgggcgcaacatttgaagtggaagatcatcatgtgaagattttaaatgaagcgcttttcaaatggaaacaagatcaaacctgctcaatacgtgaactttataacaaaagagaacttgaaacggaaggaggaggctgtaatggctgaacaaaaaggctaccttgtatttgacatcgggacggggaatgcgcgagtcgcggtcgtgactgccggcggcgaagtgaccgcgcttgaaagggaagacattgaatatgtgacggatccgctttatccggacggacgatatttctcaccggaagggttatggaagcaaatcagcgctatggcaaggaaggttattggcaaaagccctcatattacattaatcggaatcacctctacaagccagaggcagggaattgttctgatcaataaagataaaaaggcatttctcggtctgcccaacattgataacagagggcgtgaatgggaagacgggattgaggcaaaagaagaagtgcatcagcaaaccggacgtcttccgagcgctttattttccgccatgaaacttgtcggattaaaagccagacagccgtctttatggaaagaagtgaagtacatcacaagcatcagtgactgggtgacatttgagctgagcggtattttaagctatgaaccgtcacaggctgctgaaacactgctgtttgacgtaaggaaaaaggcgtggtcagagaaattatgcaacatcttcggtgtgccttctgccattcttccttcactcgtccgatctgggacggttgtcggaatgttaacgttcaagaaagcggcggttctcggtctttctgaaagagtgcctgtgattgcaggcgggggagacacacagcttgccatcaaaagtgcagatgcaaagccgggagatatcgtcatcgtatccggcacgacgacgccgattacaaagataacagcggaggccggaaccgaaagtttagagaatgcatggctgaattgccatacagaagaaggtcaatggcttcttgaaacgaatccgggtgtaacaggactcaattatcaaaaattaaaatccattttttatccgaatgaatcctacggcgttatggaacgggaaatcgcaagtctgccgaaacatgatcatgcttgtatttctgcgttaggctcctatttatcgcctgagaaaaacgcactggcaaaaggcggatttatttttgacgctccgctgtcccaaaacttaagcagagcccattttgtcaaagccgcactgctggaaatcgctttttcaatcaaatggaactatgaggcgttaacagaggtggcttccttttcacaagatgatgtgaaggtgtgcggcggcggtttccaaagtgaagctttgacgcagtttcttgctaaccttctccaaaagaaaatctataagagagaggggttcagccaggcatccgcaatgggagcggcgatgatttgcaacgaagctctcggtgtgaaagcaaagctttcgagccgcacaaaggtaattgagccggaagcggatcagacggatctcttcctatatgaagaatggaaatatacgcaaaaattatttactcattttcagccggcggtgaaagcctgacttggggatgagatgacaacatgaaagattgctgaggaggaacaaaaatgcttaataaaataggaattccgaaacaactcgcatggggatttttgggagtcgtgctgtttatgatgggggacggccttgaacaaggctggctcagcccgtttttagttgaaaacggcttgacggtacagcaatcagcatccctgtttacagtttacggtatttctctcgctgtggcgtcttggttttcaggggtctgcctcgaagccttcggcgcaaagcggacgatgtttatggggctgttgttttacgtgatcggaacagccgcgtttatcgcatacggatttgaaaatcttaatttgccagtgatgtatgtcacgtattttattaaagggctgggttatccgctgtttgcctattcttttttgacatgggtgatttaccggtcgccgaaaaacaggctcagtacggcggtcggctggttctggattgcatattgctgcgggatgtttgtattcggtgcttggtattcaagctgggccatcaaatccttcggctatttgaatacactgtggagttcaattttctgggtatgcctcggcgcgttttttgctttgattttaaatagggaccgctttgaaaagaaaaaggcagataagcgggaaaaggcgcaggaattaatgaagggaatcaccatccttgctgaaaatccgcgcgtgctctctggggggatcattcggatcattaacagcattggtacatacggatttccggtatttcttccgatgcatatggcgcagcacggcatttctacaaatgtatggcttcaaatttggggaacgatctttctcggaaatatcgtctttaacttaatattcggcgcagtcggcgatgcattcggctggaaaaagactgtcatgtggttcgggggagtgggctgcggcatttttactcttttattatattatgctcctgttgtatcacatgggaacttgcttttcgtcagcattgtcggttttatatggggagggctcctcgccgggttcgttccgatcggggctatcgtgccgacggcggccggcagcgataaaggtgctgccatgtctgtgttaaatctggctgcgggcctgtcggcatttgtcggccccgcgcttgcctgggcgttcatcgggcttgtcggcgcacaaggcgttgtttggattttcgcagcgctctatttcgtaagtgcaatcttgacaaatcaaatcaaaatacctgaagagaaaacggcaaaacacaataaagcattgcctgaatacgcttcttaacagcaccgccccgaaaattcggggcgtttttttacagctgctgaagaaacccggcaaagcgctgaatttgttcacgtaacgattgtttgttttcgtgaaattgtttgaaacgatgtccgtttgctccggacggatgcgggaagccttccagaatgaccgcatgacccattctgccgttcttcttcagcatgcggcaggctgattctgctgctttgccgagagggataagcagaatgtcctttttcatcatttctatttcatccggaaaacatgtcagcgcgtaacggctgagaagagctgacctgctgattgccggccgatgtcccgtatagtttttctgtttataaaaaacagggtgtttgataacggacgttgtatgaagaagcccccgttttgaatcaaataaccgggatgaatcctcaacgtgaagcgcggccggcagaccgcattcattaagcatttcgatgaggttctgtctcattgaaccggaaagtccggccgctttttttgtttcataggctatcatttcaagtgtttcgccatcttttaaaagctgtgccgcttttttgtaagccagctgcatttgaaaaaaaccgggtgtgattccggaaatggcaacgactgcatgagggttaatatattcattatgaggcgaataatacaaatccagatctccgtccttggctaaatggaaagccggagtcagtaaatccgattttgtaaaccctcccgaagatgatagtgctttaagctgctgcaaaaaatgcgcaagccgctcacgatcgcaaatcatgttatgcctccttgaatccgccggtttctcttagtgtcatcaaaaacgtcggatgacatgcaggctcatacatcacttttaccggcgttccagagcatcttcaggacgtgaggcgttcctttaacttcggccgccgtcgtttgcacggctgtttttttagtgagaaaatcttctttcagctctttctgcttttgcgataacagatcggtttctgttttgatttcatcaacggccgtctgcatggacgctgtcgcggcgttaatcttctttatatcaggcgctgtgtttcttttaaaacgcacggcggatacggctgcataaatgaatgcgacagccgtaacggcagcactgatatacaaaatgatgatcatctgcttttcactcctttttttcagttgataccctttacggatcgtgttgaatcattttatttgctaattgttttttttctgcttataatgtgaaatcgtacataaggacattcagaaagggtgaaagacgtggaaagcatacagaacaaaacggctcttatcacgggtgcgggcagaggaatcggccgcgccgccgctatcgctttagccaaagaaggagtcaatatcggtttaatcggccgcacagaagcaaatgtcgaaaaggttgcggaagaagtgaaagcccttggtgtaaaggcatcattcgctgctgccgatgtaaaaaaccaaaaagaggtagagcaagccgtctcctctattaaagaagaactcggtgagattgacatcttgattaacaatgccggaatcagcaaattcggcggatttttggatcttacgcctgaagagtgggaagacatcattcaagtgaatgtaatgggtgtataccacgtgacacgcgccgttctacctgaaatgattgagagaaaatcaggagatatcattaatatttcttctacggcgggccaaagaggcgccgcggcgacaagtgcgtacagcgcttctaaatttgccgttctcggtctgactgaatctctcatgcaggaagtcagaaaacacaatatccgtgtcagcgcaatgactccgagcacggttgccagcgacatgtctattgaattaaatctgacagacggcaatccggaaaaagtcatgcagcctgaggatcttgcagaatacatggttgctcaattgaaattacatccgcgcattttcatcaaaactgccggtttgtggtcaactaatccttaaacaaaaggggacctgtcttcgtgacgggtctttttttgtttccgcaacccgaataaatgggcataaagatccgtttttgcagaaaaaagagtgaaaaagaaaccgatatcagctataattaaactaaataaactatgtaccaaatgttcattaaaattatttttccccgcctctaaaaaacaaatcaatacaaaccaaactgtccgaacaataaaagggaaaacgggatagaaagagaatatttagtacatggaataatttgttagaaggaagggtgtgcacatattgaaagaagaaaaaagaagttcaaccggttttttagtgaaacaaagagcttttttaaagctttacatgattacaatgacagagcaggaacggctttacggactgaagcttctcgaggtgctgcgttcggaatttaaacccatcggttttaagccgaatcataccgaggtgtaccgttcacttcacgaactattggatgacgggattttaaagcaagtaaaagtgaaaaaagagggagccaaactccaggaagtcgttctctatcaatttaaagactatgaagctgcgaagctttacaaaaaacagctgaagacagagcttgaccgctgcaaaaagctgatagaaaaagccatttcagataatttttaaatccggccggaacgcacccggcctcccgggctcaaaaggtgattctgtgattcattatacataatagcaggctcggaacaatacatatcaataataccctcaaacttgacatcaactcctgaagtggtaacataaaaaacgtgtgaaaaatacgaacaaaatacgaacaagggagatgttaccgatcttagatcaaaagaaagttgcttttatcggagcaggatcaatggctgaaggaatgatatcaggcatggtccgcgcaaaaaaaattcccaaccaaaacatctgcgtgacaaaccgccgcaatacagagcgactcgctgaattggaacatcaatacggtattcaaggcattgcttttgacagcatgaaaaccaaagacattgatgtctttattttagccatgaaaccgaaggatgctgaaatcgctctggctgcgctgaaacggcgtattcaacctcatcaaatcatcctgtctgttctggcaggcataacaacctcatttatacaacaatcattacatgatattcagccggttgtaagagtcatgccgaacacatccagcatgatcggcgaatcggcaacagctgcggctttcggagaccatgtctcttacggttcagcaaaaaccgcggtatcccttttggaatgcctcggggaagtgtacgtgatcaaggaagatcagatggacattttcaccggtatcgcaggcagcggaccggcatacttttattatttaatggagtttattgaaaaagcaggtgaagaagccggcttagacaaacggctgtcccgcaaaatcggcgcgcaaacgttattgggcgccgctaaaatgctgatggaaacgggtgaaaaaccggatgtgcttcgggaaaacatcacctctccaaacggcacgacggaagccggcctcgatgcgctcaggtcagaaggcggcggagaagccattgccaaagccatcaaacacgcgaccgaacgttctattgagatcagcaaaacaattgaaaaaacggcagcactataatcgttaaaaaacaggagtgatacagtgacgtctcggacgaagatcaaaagagtcgcggtgaaaatcggcagcagctcactgacgagcctgcacggggaaatcagcagaagaaagctggaagcattggtggatcaaatcgcacagctgaaagacagcggctatgaagtgattttagtatcttccggcgcagtggccgcaggttatcggaagctcggatttattcagaaaccggaaagcctccctgaaaaacaggcttctgcttccatcgggcagggattattaatggaggcttattcaaagctgtttttagcgcacggttatgtcgcatcacaaattttaattacaagaagcgacttttccgatgaatgccgctaccataatgtccgcaatacgatgaacgtccttttggaacggggcattattccgattattaatgaaaatgacacggtcacagtcaaccggctgaaattcggagataacgatacactcgcagcgaaggtggcaggtttaattgatgccgacatgcttgtgattttatcagacattgacggtttatatgatgataatccgcgcagcaacccgaaagcgaaaagaatcagacatgtaagtgacatcactccggaaatagaagcaagcgcgggagatgccgggagtgaaatgggaaccggcggaatgcgttcgaaactggatgcttttaaaattgtgatggcctccggtattaaaggctttctcgggcaggctaacattccggacattctgcttcaagcggtagatgaggcggctgaaggaacttattttgaagcggaaggaaccctgccgttaaaccacaaagaacaatggcttgcatttaattccggccccgaaggcgaaattgtgatggaaaaggaaagcagccgcgatgtcgcgaacggaaatatggagctgtcaccgcaggacatcgagcagattaagggcagattcagcagcggagcggttgtcaggctgcttgatcagcagggagaagagctcggactcggcatcgtcaactattcctcagcccagctgaagacatttaaagaaacgccgcacaaacagaccgatcaatcagtcattgatccggaagcgtttgtctgccacgttgaactatccattccgatcggctgagaaagatctataaaaatatgaaaaagcccgaggcttcgttttgaagctcgggtttgttttttattgatattgttcaagtttggagaaaaattgaatgacaaaatgatagaaatcatttgcagacggagccagttcccttccttttggtttaataatgcctacggtgcgcttcacttgaggaaattcaatcggaattttgaccgtgaaccgaggggtggtttctgcaaaggtgctttcaggtaataaagtaactcccatccccgcggagactaatcctttaatggcatctaaatcctcgccttccgtcgatacaagcggcgcaaagccggcctgtctgcaagcgtcaatcgccatgttacggagaataaacccttcaggaaataaaacaaattggtcgccgcgcagatcaattaaatgaatatttttctgtttggcaagcggatggtgcagcggaacaagcgcgtaaatcttttccgtgaataagatattgcctgttatgtcggggaattccgtcggaacggggccgagcagcgccgcatctatatccctgttccttaccgcttcgattaaaaacttataagacccctggcggagcaaaaactcaacgttcgggtattcctctttaaacgccgaaatcaccgtcggcaaaagctggcttgcaaggctcgtcggaaatcctattttgacggttccgcgattcggatcaagatattcatcaatttgttccttcgcgtaatcaattgctttcatcgccgttttaacatgttctaaaaattgtttgccgatcggcgttaatttaatatttctgccttcccgttcaaataaagtgacttgcagctcttcttcaagatttgcaatctgcctgctgatggcggattgtgcgacatgcagatgatcagccgcttctgacacatgttcccgttctgctacctccataaaataccgaagctggcgtaattccattgcgttcacacctatctatctcattttgagatgtatttgatctaaattatatattgtttatattgttttgaaaacttacaattaatttaaagttgtcagattttatgaccgataattaacggaaactgatcgggggagaggaattatgacttacaatcaaatgccgaaagcacaaggtctctaccgtccggaatttgagcacgatgcatgcggaatcggcttgtatgcccatttaaaagggaaaccttcacatgacattgtcaaaaaaggactgaagatgctttgccagctggatcacagaggaggacagggcagtgatccgaatacgggtgacggcgccggcctgatggttcagatccctgatgctttttttaagaaagagtgcggagaaatgagactgccggaaaaaggccgttacggggtaggaatggtctttttctcgcaaaatgaagaggaaagaaaaaagatcgaaaaacaggtgaatgcattcattgagcaggaaggacagatcgttctcggctggagaaccgtccctgtaaatgtcggaaaaatcggaacagtggcacaaagcacttgcccgtatgtgcgtcaagtattcatcggcgcctcaaacgatttgaaagacagccttgcttttgaacgcaaactgtatatcatccggaagcaggcggaaaattggggcgttcaagaacagcttgatttttacttcgcaagcctgtcaagccagactattgtttataaagggttgttaacgcctgagcaggttgacgcattttatttggatttgcaggatgaaaccttcgtatctgcattctcacttgtgcattcaaggttcagcacaaatacctttccaacctgggaacgtgctcatccgaaccgctatctgattcataacggagaaatcaatacgctccggggcaatatcaattggatgagagcaagggagcagcagttcgtttcagaaagcttcggagacgatcttcacaaagtgctgccgattttaaatgctgagggcagtgactcatccattcttgataatgcgtttgaatttttcgtgatggcggggcggaaaccggcacatacggcaatgatgctgattccggaaccatggacggaaaacactcacatgtctaaagcgaaacgggctttttatgaatatcacagctctttaatggagccgtgggacgggccgaccgccatttcgtttacggacggaaaacagatcggcgccatccttgaccgtaacggcctgcgtccggcacgttactatgtgacaaaagatgaccatattattttctcatctgaggtcggcgttattgaagtagagcaggagaacattcttcataaaaaacgtctggagcccggaaaaatgctgctcattgacttagaagaaggccggattatttcagatgaagaagtgaaaacagaaattgccaatgaattcccttatcaaaaatggcttgaagaagaattggttcaagtgaatcctgacccggaaatccgggaagaggaacaattcgatgatcttctcgtccgtcaaaaagcgtttggctatacgtatgaagatattcagaaatatttaatccctgttattaaagaaggcaaggacccgctcggctctatgggaaatgattcgccgctcgccgttttatccgaccgcgcccaatcactgtttcattactttaaacagctgtttgcgcaagtcacaaacccgccgattgacgcgatccgcgagcagctggtaacttctacggtgacctggcttggggctgaaggtgatctgctgcatccgagtgaaagaaatgcacgccgcataaagctttatactcctgtattatcaaacgaacagttttatgcgctgaaaacacttgtgcaccctgacattaagagccagaacatccgcacgctgttttcagatgacctagaaaaaggcctgaaggatttgtttcagcaagcggaaaaagcgatcaaggaaggcgtatctctgttaattttatctgacagggcaatgagtaaagagttgacgccgattccgccgcttttggccgtcagtgcgctgcatcagcatttgatccgccaaggtctgcgaacaaaagcaagcattatcgttgaatccggagaagcgcgtgaagttcatcactttgcggctcttatcggatacggtgccgatgctgtcaatccgtatttgacttacgctacgtataagcaggaaatcgatgaaggccggcttgatattccgtatgaagaagctgtcagcaaatacggaaagagcgtaacagaaggcgtcgtgaaagtgatgtcaaaaatggggatttcaactgtgcaaagttacagaggcgctcaaatttttgaagcggtcggcatcggtgaagacgttatcgccaaatactttaccggtactgcatctcagcttggcggaatcgatatcgagacgattgcgcaagaagcgaaacagcgccatcaagcggcgtacaaggatgattacagccaaacccttgatccgggaagtgaattccaatggcggaacggaggagagcaccacgctttcaacccgaaaaccatccatacgctgcaatgggcctgccgcaaaaatgattacagcctgtttaagcagtattctcatgcagcggatgaagaacgaatcggatttttacgcaatctgttcgccttcaaagaagaccgcaagcctttaaaattagaggaagttgaatcagctgcttccatcgtgaaacgttttaaaacaggagcgatgtcattcggttcattaagcaaggaagcccatgaggctttagcgatagcgatgaacaggcttggcggaaaaagcaacagcggagaaggcggcgaggacccgaaacgtttcgttccggatgaaaatggcgacgacagaagaagtgcgattaaacagattgcttccggccgtttcggcgtaaagagccattatctcgtcaatgcggatgaattgcagatcaaaatggcgcaaggggcgaagccgggagaaggcggtcagcttccgggcaacaaagtatatccttgggtggcggatgtccgcggttctacaccaggtgtagggctgatctcaccgcctcctcaccatgatatttattcaattgaagatttggcgcagctgattcatgatttgaaaaatgcgaatcgaagcgcgcgaatcagcgtcaagctcgtgtcaaaagccggtgtcggcacaattgcggccggtgtggcaaaaggcactgcggatgtcatcgtcatcagcggctacgacggcggaacgggcgcgtcgccgaaaacaagtattaaacatacgggtcttccgtgggagcttggtcttgcagaagctcaccaaacgctgatgctgaacggtttacgggatcgcgtggtattggaaacggacggtaagctgatgacaggccgggatgtcgtaatggccgccttgctcggtgcggaggaattcggctttgctacagcgccgctcgtcgttctcggctgcgtcatgatgcgagcctgccatttagatacatgtcctgtaggtgtcgcgacgcaaaatccggagcttcgcaaaaaatttatgggcgatcccgatcatatcgtaaactacatgctgtttgtcgcagaagaagtgcgtgaatatatggcgcagttaggctttaagacgcttgatgaaatgatcggacggacagacgttcttcatgtcagtgaacgtgcgaaagcgcattggaaagcgggccagcttgatttatccacactgctgtaccagcctgaaggcgtacgcactttccgtacggcgcaaaaccataaaatcgacgagtcgcttgatatgacggttattcttccggcggtgcaggctgcaattgaagccggacaggaagcggaagctgaaatcaagatcaataatacaaatcgcgtagccggaaccgtgacgggaagtgaaatttctaaacgctacggagcggaaggcctgccggatgatacgatcagacttcattttaccggatcagccggacagagtttcggagcatttgtccctaaggggatgacgcttcatttgaacggggattcaaatgactacgtaggcaaagggctttcaggcggaaaaatcatcgtgaaagcgcctgatgccttcaattgtgaaacacacgataacgttattatcgggaacgtcgcattttacggagcaacaagcggggaagcgtacattaacgggcgcgcaggtgaacgttttgcagtccgtaacagcggagtcaatgtcgttgtagaaggtatcggagaccacggctgtgaatacatgacaggcggccgggttgtcgtcctcggcgaagtcggcaaaaacttcggggcgggaatgtcaggcggtatcgcatacgtcctgagtgatgatgccaaagcatttaaacgcaaatgcaacatggaaatgatttcatttgaaaagctgacggatgaggcggagatcaaagaagtgcaagaaatggtcaaacggcatgcggcgctgacaaacagcaaaaaagccgcagatctcctggacaattgggaaaaagccgcagaaacctttatcaaagtcattccgaaaaactataaacaaatgctcctcagcatcgaagaacaaaaagcggcgggtttatcagaagaagacgcaattatgtatgcttttgaagccaatacaaaggtcctccaaacgcctgcgaaagatcataaacaagcggtagtacagtaagaaaggggagaggaacatgggaaaaccaactggattcatggaagaaaaacgagaaaaaccggcggagcgggaccctctcactcgcttaaaggattggaaagagtattcggctccattttcagatgaagcgtcaaagcggcagggggcgcggtgtatggattgcggcacaccgttttgccaaatcggcgctgatatcaacggttttacgtccggctgcccgatttataatctgataccggagtggaatgacctcgtctatcgggggcgctggaaagaagccttggagcgccttctgaaaacgaataactttcctgaattcacagggcgggtctgtcccgctccttgtgaaggatcttgtacgctggctatttcagatccggctgtttcaattaaaaacatcgagcggacgatcattgacaaagggtttgagaacggatggattcagccgagaattccagcgaaacgcacaggtaaaaaagtcgctgtcgtcggttcaggcccggcaggtctggcaagcgctgatcagctgaaccaagccggtcattccgtaacggtctatgagcgtgccgacagagccggaggcctgctgatgtacggcattccgagcatgaagcttgagaaaaatgtcgtcgaacgccgtattaaacttttgacgcaggaaggtatagattttgtaacaaataccgaaatcggcgttgacataacggcagatgagctgaaagatcaatttgatgccgtcattttgtgcacaggcgcccaaaagcagcgcaatctgctgattgaaggccgggaagcaaaaggcgtccattatgcgatggactatttaacactggcgacgaaaagctatttagattccaacttcaaagacaaacaatatatagacgctaaagggaaagacgtcatcgtaatcggcggaggagacacaggagctgactgcgtggcaaccgcgctgcgccaaaaagcgcgcagcgtgcaccagttcgggaaacatcctaaacttcctcaaacgcgcacgaacgacaatatgtggcctgaacagccgcacgtctttacccttgaatacgcctatgaagaagcgcaggcaaagttcggcaaagacccgagagaatattcaattcagacgacaaaaatggtggccgataagcagggccgcttacaagagattcacaccattcaaatggaaaaagtcagaaacgaattcggaaagtatgaatttcatgaactgcccgggacagaaaaagtctggcctgctcagctggtgttcatcgccatcggttttgaagggacggaacagccattattgaaacagttcggtgtcgattcggcaaatcataaaattcaggcggcatatggggattataaaacgaatgttgacggtgtttttgccgcaggggatgcgagaaggggccaaagcctgattgtatgggcgattaatgaaggccgggaagcagcgcgcgaagtcgacagttatttaatggggagcactgttttaccgtaaataaaggggtttatttataaaaccggctgggatcagccggtttttcgtattgaaatgaaacctccttcttcctttattggtcatataagggtaacgcggaagataacatatggaattttgttttacagagtggagagattgttttcttccgcagactgagacgatttgcaagccttgagcagttgatcacggtgctgctgacggtctctgtgtgtctgcagtcgatttgcgggcagatttgaattgatgaagaaaaacatattgaatttcaagcggaaacgcttataaacaaataaggaaacggacgggtccgctcctcttttttagacatccaaacgaaagccgatattgccgaactgccgtccttcccgcattctgttaaaagcggcagctgcttcactgagagggtacatgcggtcgataatggggcggatgccgcagcggtttaccaattccagcatatccgcgaattcctcattgcttcccattgatgtaccgagaatatgaatctgcggaaaaaacagcgagcgaataggaaatccgagatgatcgcctgaactggcgccaaatgttacgatccggccattcggtttcataatgtcaagatagtgttgaaacaaggccgggcctacaccgtcaagtatgatatctgctttttcgccattcagcgcctcattccagtcaccgtagctgccaatcgaccggtctgcaccgtatgacagtgcggtttgttttttgttttcgctgcgggaggtgacgctgactgtcgctccgatagcttttgccattaataaggcgtatgttgccacgccgcttccgatgcccggaaggataaggtgttcgcctttttttaattgtccttttgtaaataaggcgcgataagcggttaatgctgataacggcagcacgcccgcttcttcccaagtcaggtgttcgggttttaaaacggcattttccgcaggaacgatgacataaggtgaaaaggttccgtcgctcggaccgcctaaaatatcagggacggctggtacgtcctcaacagtcttccaattcagcaccgggttgatgatgacttctgcatgcagtaaatgagaccggacgccgtgtcctatttcggttacgattcccgcgccgtctgaaccgagagtaaattcatggtttccggtttcgtggtttttcattaaaaacaaatcacgatggtttaatccggctgttttcagctttatttttacttcgccgtttcccggccttttgtcaggtgcctgcctgaaatcaaagccattttcgtgtatgataagggcattcatcattcttctctcctttatgattgatgagaaagattttacaggctgtatcagctgcagtaaataaatgaaaattgatagccggctatcaataaaattcatagcaagaaggtgcccttacatggaaagcggagacttaaagatttttcaggctgtcgcccgcaaaggaagtatttcaaaggcggcagaaagcctgcattatgttcaatcaaatgtgacaaaccggattcagcagctggaacggcaattgcaaacacagcttttttaccgcacaaatcggaggatgacgctgacgcctgcaggtgaaaacttattgaaagacgcagacagaatccttcaattgctgcatgaggcgcaaaaaacggctcaagaagcaggcgatccgaacggcccgcttcgaatcggttctcttgaaacggcggcagtcgtccatctccctcaatttttcacagagtattgcaaccgctgcccgaaagtacagctgtctctgtcaatcggtgatacacataccttagtgcagcacgtcttacgctatgagctggatggcgcttttgtttatggtccggtcgaatacgaagatcttgagcaagtcgctgtatttcaagaagaattggtcttggtttcaaataagcgggaaggcagtttgcaagacttgttgcgagatccgattctgtattttgccgcgggctgttcgcaccgccgtaaaataaaaaacatactgaaagaagaggcagtgcccgcacataaaatcattgaattcggtacgttggaagccattattggggcggtgcaggcggggatgggggtttcttttctgcctgcatcagccgtccgttattttcaaaacaggaaaaatctttttcttcatgagcttcctgaacagtttcgggatatgaatatatcattcatctaccggagtgatttatttttgacatcggcgtttgaagaactgctgaatggattaaaagcattaccgaacggatgatgagaaaacaggacagctgtgtacgccaattttttcgttctggtttttctcaaaagaaagcgggtatccgggctgagcttgatcagcgtgatgaaaaactcggctataaaatcagagaagcacaaatgaaaaaaatcccgtatattgctgttgtgggagatcgagagtgccgccatcaatctgtacatgtacggcaatacgggcgggaagacacatttgaagagaatgtgagtgattttatttcccggatcataagagaggcaaaacaaaaaatagagatttaacaaaaacaacattgacatatcgtaaaatcacgatataataaagcgtatgaaacctattgatgtttttaaagcgttgtctaatgagtcacggcttgagattttacaatggctgaaagagccggaccgtcacttcgccccgcatgatggcattgatatgaatgagatcggagtatgtgtcagccagatcaccgataagcttcagatgacacagtcaacggcgtctcaatatctttccatccttcagcgggcgggccttatccaaacaaaacggattggcaaatacacctattataaaagagatgaagacgcgataaaggcgatggccgattattttcagcgcgaaatgtagggctgaatcctttagaagagggattcagtttctttttccgactacacatcgacatattgcgatttgtttctttttgttcaactctttatatcgatatatcacaatatatctttatataaatcatcaatgaaggagtgtgtcaggtgcaaaatacctggaagatttacattttggcaattatcagttttttagtggggacgtctgaatatgtgatatcagggatgcttgataaaattgcaggttccttgggagttactgtggcagcggcagggcagctgattacgattttttcacttgtttatgcaatcggaacgcctgtcatgatggcccttacagcaaaactggacagaaggaagctcatgatctatgctctggggctgtttgttatcgggaatatcatttctttccttgtgcagggattcggcttatttgcgggagcgcgggtgttcatggcgcttggagcaggaactgtggtggtcaccgcgcttacgatcgcagcaaaaatcgctcccccgggaaaacaggcaagttctctcgcaaccgtcattatggggtttacggcggcgctcattatcggtgttccgatcggaagaaccgtgtctgaagcttttggctggaaggtggttttcgccggaattgcggcaatcggaatcattgccatgcttattatacgtttcgcgttgcctgagataaaaggagataaaccggtgccgctcattcagcaattttctcttttgaagaaacgaaaggtggctgccgggctggccattacgtttttttggctcggaggctactcggttgcgtatacgtacctttctccgtatttactgaacgttactcatatcggaagcggaatactgagtacattgctgcttattttcggtgttgcaagtcttgccggttctaaagcaggcggtttcagcgcagacaaatggggggcgcgtatgacattaaccggcggaatggcgcttcatgctatcatgctcatgttattgccgtttgtcacacattctgctttcggagcggcggcagtgcttatgttttggtccttcgccgcctggtcatctgggcctgctcagcagtatcatttggcaacgatggagcctgaatcatcgggtgtattacttggcctcaaccagtctgtgatgcagctggctatggcggccggggcgggcatcgggggcattgttgtcacccatctgtctcttgcgtcagtgacatggatcggatcagcgggtgttgtcatcgcgatgtgcggcgtgctttcgcttgcgtcattaacgtctgaaaaaacctcatctgaatacagtgcagaataaacaaaagcctcatttctcagcttgagaaacgaggctttgtcttgtcatttttcacattttttcaagtttacgccgattgcggctccgtttcggcttgagtcggcaactccggtgaaggtgccgttttcacggtcaatcaggatgctttgcacattaccgatatcaaccgggctgctgccgaatttatgccccatttcgttcagttttgtgcgggcttcttccggcactcctttttcatatcgataggatgtcatgctgtttgtgtaaattctcggctcttcgaccgccgctttcagatccatgccgtactcaactttgttcagaatcgtttgcaggacggaagaaataatcgttgctccgccgggggagccgacagtcaggacaggttcgttatttttgaataaaatagtcggagtcatgctgctgagcggacgtttattcggctgcacttcatttgcgccgccaggcaccgcatcgaagtctgttaactcattattcaacacaacgccgtatccgggaaccataatgccggaaccgaacagctgttcaatcgttgtcgtataagatacgacattgccgaagcgatcggttaccgtgaagtgagtcgtttggccttcttgtttgtcagtcggctgctccacttgtttatagtttgcagaaccttcctgataggcccaagggtcgccggctttcggttttttattgactttatcaatatctatcagctgtctgcgggcattgatataatctggattcaagaggcctttgagagggacgttgacgaattctgggtccccggcaaatgcggcgcggtcagcataagccaaatgcatcgtttctgcgagaagctgatatttttgccaagaacggatatcatattgagaaagcttaaaatcatccaggaggttcagcatttgcaacaggaaaacaccgcccgagcttggaggaggagcagttgcgatatgatagccctggtaatctccccagatcggttcgtcaatcgtcacattgaagtttttaatatctttttctgtcattgagccgccgaattcctgcactgtttccgcaagctttttggagaatgctccgtcatagaatgcttttgtgcctttgtacttaatagctgtaaatgttttggctaagtctttttggatgagtgtgtctccttctttcagaggttctccgtccggaagaaacacgtcttttgcagcagtgtgtgataatttgtctttataatctgagatggcatcagctaaaaccgaatcgatcggaaagccttttgaggcaagtttaatggaaggggtgatgagttgtttcatggagcgtgtgccccatttgtcgagcgctttttcaagcccttttaatgttcccggaacaccgactgcagtccctttcgtaacgcgttcggagaaagggatggctttgccgttttcgtcaaggaacatatccggtgttgcgcctgccggtgcgcgttcccggctgtcgataatggtggtgtctttcgtcttcgcatcataaaccatcataaatccgccgccgccgattcccgacatcatcggttcagttacgtttaatgcgaattgaatggcaaccgcggcgtcaattgcattgccgccttttttcagcacgtcggcaccgatttgtgaagcgagagggtgggcggtggcaaccatgccgtctttgccgacatctacctgtttgtagtcgtcataggaaaacgggtgtttcttagcctgagcgtgataagggatgcttccggccgcgagcaacgtactgagcagaacgataaaacagagattcataaactttttctttttcatagtctgcctcctttgttttccgcttacaattatagagtaagtaaaatgtgctgttttcacaagtgacaaacggaatagtccggtgcgcaaaaagccggagtttctgtgtgaatgtaatcagtcgcaaataggctaaatgggaaaccggactgaaaaagctgtgaaacaagcataaagacaaaaaataagctacaatgaacaaaacagaattcactcacatgacatatgaaaggaacgtgagccatgtatttaacgatcaaagagacagcggagtttaccagtcttcctgaagaatatgtgcacaatcttgttttgacgaataaaataagggccgtccatgacggacagcaatatttaatcaacaaggaacaatttcaaacccatctcgaacagctggaaaaatataaggaaatgattcaagagtttttaaatgagccgcttcctgaagacattgatgtaaaagatgaagactaggacacaatttcatattgtgtcttttttttgcatttttttcggttgctcacaaaaaaacggatgctcagatttcattttaagtccgttgttttcattttttaatgccttgggtctctatttgtttaaaagcttgtcaccgggctgaaaatgatgtttttgaggaatttgttgaaactgcgtatctggttcaccttatgtaacactatgtatattatgttacataagaccctttatcctttatcattcaacgggtttcggctataatagtaacataatgctcaatatgttactttaccaattataaggggttttttgatgcatatcgtacagccgatccgaagtttggagaagatccaggaagtcaaacagtatttaatgaagaaaagtgatcgtgattattttttatttattttcggcatgaacagcgcactgcggatttctgatgttctgccgcttcgcgtgagagatgtcaggaacaaagatcatgtgtgggcaaccgaaagcaaaacgagaaagaaaagaaaaattctgatactggagtctttaaaggccgacatatacgcttatacaaaagacatgaaagaggatgactatttgtttaaatcgaaacggacgaataagcccatatcccggattcaggcatacagaatattaaaggaagcggctgccgcttgcgggttggaggaaatcggaacgcacacgcttagaaagacgttcgggtatcatttttatcagaggacaaaagacattgctgaactgcagaggattttgaatcattcttctccgtctattacaatgcgttatatcggaatagatgaagatacgacgagagccgcctataaagtgttcggagggctgtaggcttgaaaaaaacggccgccagcgttactataatagaagcaggctctagtagcacagcggatagtgcagcagtttcctaaactgcaggtcgggagttcgaatctctcctagagcgtttttggcataagataggcgcagcttaataatgtcggtaaaacagaaacccccttgttatacaagggggttttgagttgaatattttgtgaaaacctggtggaaatttatgttttgcacaaattttgcacattgctatgcaagtgtttttgcggccgtgttgttttttttaaaaaaatcaagggtattcgtttatcttcttacttcttaaccgtcaactgcttctgaaaaacagcctcccgttataatatgccagcatatcattgaaaaaagcccgctgtaagcaagcgggctttttccttatatgacagcatcaaattgattgactttccaaacgttgttttcttttacgaatgttacatcgcgtttagctgacggagaaccgtcaagagtcggcacagtgaagcggtatgtttgagcgcttccttttttagaaagaagagtcatttttgcttttttccaattcaggaggttatctccgtcgccgaccggaacagccaatttgccgtcttttacagtgaagtggtaatctttgagccctttgtcaatcgcttgctttgtaaaagcgggtgtcagatattttacggcttttgcttttgttccgaggtctttgcacataaatacatattgcagattttgatattcaaacggttcagaagtgcaattttcgtttgttttaagcgcaccgccgctcatcgtgttccagaaatgttctctcgctgacagggccagctgaagcgcttgtttttgtgtaaggtcattaggtgcattttttgcggtcgccgcagtgcccaatgacagaatcaatgtaatagtagtgaggaataatagccattttttcatgatataatctctccttcaatcaatctctttctcttatgttacaaatgttacaataattacgttaagattacaataccttttcagaaatattttccggactttttatttttatggtttgtttccgtgtaagacgtgagaaaaagataaagagtttcattgaacaaaaggtttttacaagctgtctgctgaataatatggaagaaaatcaaaaaaggagtcctacatatggaagtacaagatcatttagaaacagcggaaggccgcggccagtctgtctggcgatcgatgtcactgtttttagtgccgctgcttttaagcaatgtattgcaatctgtcggccaattggtcggaatggtatttgtcggaaggtggctcggagttgatgcgcttgccgccgtatcgtctttttttccgctgttttttctgctgatctcctttacgatcggaatcggttcgggaagttccattctgatcgggcaggcttacggcgcgaaaaacgaagagaggatgaaggcgattgtcggcactacactgacttttacctttatgctcggtgttgttctggcagttgtcggcagtgtgtttacgcttgatattctgcggctgatgggaacgccggaaaacgtaatagatgtcagtgtccgatatgcgcgcattttgttttgcgcaatgccgctgatgtttttatattttgcgtatacgacatttttacgcggaacgggagattcaaagaccccgttttatacgttaatcgtcagtacagtcataaacatcgggctcttgcccttattgattctcgggcttttcggacttccgaagttcggcatttacggttcggcgtatgcaaccgtgatttcaaacatcgtaacatttatcgtactcatggtttatttacggaaaagaaaacatccattggcatttgaccggactgcgctccgttctcttaaaatggacaaaaagctgctcgcgcttttactccgtctcggtattccgtcgagcatcaatatgattctcgtgtcactttctgaaattgcggtcatttcatttgtcaatcattacggatcaaacgcgacggctgcttacggggtcgtcaaccaagtggcgagttatgtgcagatgccggcggtaagcctcggtatcgccgtttcaatttttgccgcccaatccattggcgccaatcaattcggccggctgaaacaggtcatcaaagtcggcatcggcctgaattatttgatcggcggggtgttgatcctgctgatttacaccttctcccggcagatactggctttgtttttaacagatcaggatacactccacattgcccgcaatctgattatgattaccctttggagctatttgattttcggtcacgctcagatcgtttcagcaacaatgcgggcgagcggtacggtgttatggccgacgattatcagcatttttgcgatttggggaattgaagtgcctgtggcctttattctttctcattatacgaatctcggcattctcggcatttgggtcggttatccggcggcttttgtcgtcagcctgctgctgcaatacggatattaccggtttgtatggaagaaaaaacagattacccggctgattcaataaggttttaccgcacatcgctcagttcatacgggcgatgtttttttagagcaggaaaatgagtttagaaaatggaattcctatacatgctagaaaacaaggaaagggcaggtgcttatgacgattgaacatacgacttatttaggggtttcagccataaaagcggagactgatcaggctgaatgcatcattgtgccggagtggggatcaaatgtcatatcgcttcgggataaaagaaccggtatgcggcttctcagagaaccggaaactgcggagcaattccgcgcaaaaccgatgctgtacggcattcccgttttattcccgccgaaccggattacggacgggacgtttcgttttgacggccgcgcgtatcaattcgagataaacgaagaggataaacataatcatattcacggctttcttcacaatcagcattggaaagcggcggcagcgaaagaagagggggatggaatgacagtcgaaacagaaattgatctttcaaagattccccgtgttcataaacaatttccgcacgatgtcattgtccggatgacctatacattaaaagacaatgtgtttacgcagcgggcgctgattaccaacaatggaacggaggcttttccttgggggctcggctatcattccacatttgttttcaatgaagagcgatcccgtctttttctgacggctgaccgcatgtgggaattaaatgaacgtttcgtgccgacgggccgtttattggatgtgcctgataaagaagcgttccgtcatgggatgtctttgaaaaataaacagtttgacgatgtttttctttcttccggacggaacggcggcaataacgaagctgttatttctcatccggatgagaaattatccgttttgtatcaggcagacacgtctttcaagcattgggtggtatataacggtgacggaaagcaggggtttgtcagtcttgagccttatacttccgttacagatgcatttaatctgaatcagcctgcatcactgacagggcttcagattctgaaaccgggcgaagaagcggctgcgtcatccaggatcaccattttgcatgacgaagaataggaaagaggcgggataacattgaaaatatatgtgaaacgcttgagcgcggtgattctgcttttgatcattgccgcagttccttatattgatgatgcggctaaggcggctgaacaaaaaaatactttgcaaaaagagctggaacacattctggatgaagaacctgctttaaagggggcttcagcgggcgtcagtgtccggtcagcaaaaacaggggaggtgctgttcggcagccgggaagatatgcggctgaggcctgcatcactgatgaagctgctgacggcatctgcggcgctttccgttctcggagaagattacacctttaagacagaagtacgggcagacggcgccgtgaaaggaaaacagctgcgcggaaacctttatctcaggggaaaaggcgatccgaccctattgggttctgattttgagaagatggctaaacaggtcaaagccagaggcatccatgtcattaaaggagatctggtcggggatgactcgtggtatgacgataccaggtattcagttgatcttccgtggagcgatgaaggccaatattatggtgcgcaagtatcagctcttaccgcttccccaaatgaggattatgataccggaacggtgattgcggaaatcagcccggcaaaacagcccggtaaaaagccgcgcatttcgatttctccccatacggacgtcgttcgtgtgaaaaatgaagtgaaaaccgtcgcttctgatgaaaagaaagaattgacggttgaacgggagcacggtggcaatgtgattacgataaagggaaccatacctgccggctcggcacaggcaagagaatgggcggcggtgtgggatccgtcgtcctatgctttagatttatggaaacaagcgcttactaaacagggtataactgtaaaaggggaaatcagaacagggcgaatgccgcaccgcacccaacttgtcacatcacggacatccatgcctctttcagaattattgattccgtttatgaaactgagcaacaacgggcacgccgaaattctgatcaaggaaatgggaaaagtgaaaaaaggggagggcagctgggaaaagggcttggacgtgatgaaatcggagcttaaatcgttcgggctgaatccggatgaattgattgcaagagacggatccggcgtttctcatgttaacggcgtatccgccggccaaatcggagagcttttgtatgcggttcagaaagaaaagtggtacccgtctttccttcggtcgctccctgtcgccggcgcaagtgacagaatgacgggaggaacccttcggaaccggctgaagggcaccccggcggagggcaaaattaaagcgaaaaccgggtcactaacatcagtcagttcgattgccggctatgcagacacaaaaacaggagacacgcttattttttccgtgcttcaaaacgggctgcttgacgaagatgacggaaaagacattgaagacaaaatcgcagtcgtgctggcaaatcaataagaagggccgaatccttagaggattcggcttttttgatgtctgtaaaacattatattgcgattatgaatcaatcttttcaaaaagtaatatcggcaatatccttccttttttttacatgatactttcttacttgttcaccgatttttcattttttaacgtaaaacttcttttaaggaggcaaaacctttttaaaagcgcaattaattatacattttattccttattatagtgtttaagaaccagtttgtagtgtgcatacataccgttttacatggtataaagattatagaaatgaagaaatgaagtgaggaatatatactatattctaaaaaatgttagagaaaatttaattttttattgtgatttctaaaatatgttttaaaataatgcttatatggatgatttagtcatatgctgtcgaaatttaattgtaattatttcactttcttatcctcttaaattgaaatggagggattccattgaagaacactgtttattctttaactcacgcccaaagaagagtctggtttacagagctgctcgagccgggcacaagtatctgcaatctcgcggcgtgcgtcaaattcaggggggacatcgattttgacgtactgcgccatgctttagatttttctatctcgcaaaatgattcactcaggtttcaactgacagaaggggacggatcagaaccccagctgtatctggcggggcatcggccgatttctctagagactgttgattttactcatactgatcaggcagagcgggacgcatggattgacacgcagacccgtgttccgttcaagctgtttcattcacctctgtatcaatttactctgcttgtcatgtcagacgaagaagtttggctttattcaaaatttcaccatattatcatggacggcatctcgctcaacctgctcggcaaccagctcattgatatctaccaaaagatcatgcggggcgaggatttagctgaacatcacagaccttcctatctcagctacatggaaaaagaacagcaatacttacagtcttcccgttttcaaaaagaccgttcattttggactgaaacataccgaaccgttccggaacacctttcactggcggaacgaacctctcatcttagacaaagcactgcggcttccagagatacaatcactctttctcactccttagaacaatctatccggcgtttttgcaaagaaaataatatcagcatcatctctctgtttatggcttcgttatacatatgcatcagccgtctgacggctaaaaaggatattgccatcggcacttattacggaaaccggggctccaggctcgaaaaggatatgctcggcatgttcgtcagcacactgccgatcagaatgacggcagatcctgatgcggagttcctgtcctttgtccgcagcgtaggaaaagagcagctgtctgttatgcggcaccagaaatatccttacaatctttttgtgaatgaattaaggcagactcatcacgacctgcaaaatatcatcgggatttcgatgcaataccagcctctcgcgtggcgtcaggcagaaggtttcgattatgaaacggcgatgtttttcagcggacatacggcaaatgagctgtccattttaattaaggagcggacagatacgggattgattgagctgaattttgattatcaatccgctttatttactaaaacatcgattaaacgaattcaaactcatttgctgacgatcgttgaaaatgccgttagaaatccaaaccagctgattcggcatattgatatggcggatgaaaatgaaaagaaacgggtgttaactgcgtttaaccgtacagaagcggttgaaccgccggctccgacgcttcacgggctgttcacccgccgcgccgcgctttcgccgcatcgtccggcgctccgttttccgggcggcatgctgacgtacgctgagctcgatcagtacacagacaggctcgctgttcggctccgccaaaaaggcgtccgcaaagaaagcatggtcggcgtactcgctgaacgctcgccggagatggtggtttcagtgcttgccgtgttaaaagcgggcggcgcctatgtgccgcttgacccggactatcctgaggacaggctgcgctatatgctcgatgactgcggcgcttgtctcctgctttcacagccggggttatccgttcccggtttttccggcgagacactagaagtgtctctttctgctctgacaagtgagacggagacaggggctgtctctgaagaagcggatgccgattcgctcgcttatatcatttatacgtccggttcgacgggaacaccgaagggagtggctgttgaacaccgtcaggccgccgcctttttatcagggatgcaagggcagtttccgttaacggaagaggatattatcgtgctgaaatcatccttttctttcgacgcctccatctggcaattgttttggtggacgatgtccggcgcctccgtgtatctgcttcctgccggatgggagaaagatcctgtgcggatgattgaagctttttcttctgaaaaggtgacgaccgggcattttattccggcgatggtcaacagctttttagacgcgctggaaacagagcctgaggaaacaagaacacgcctcggcagaacactgacacgcgtgtttgccggaggggaagctctttccccgcttacggctgcccggtttgccgatctgttgccggagaccatgcttattcacggctatggaccgacagaagcgacggttgatgcggccttttacgtctgtgaccgaaaacgggacagcggacggacaaggcttccgattggtaaacccgttcctggtgcccgtctgtatgtatttgatagcggaggaaccatccagcctgcgggcgtggcaggagagttgtacattgcggggacaggggtggcccggggctatctgaaccggcctgagctgacggaggagcgctttctcgatgatccgttttatccgggagagcgcatgtatcaaacgggcgatatcgcacgctggacagaagacggccttgtcgaatggctcggccgttcagacggacaagtgaaagtccgcggctaccggattgaaccgggggaaatcgaagcagcgatccggcgcatcgacggcattcgtgaggcggcggtcaccgcccggaacgaacacggagataccgcgctttacgcctatattgaaggacgggaaagcgatgacgtgcgggcggagcttgcgacacgccttccggtctacatgatgccggctcagtttatagaggtgagcgaatggccggtcacgccgagcggaaagcttgaccgccgcgcgcttccggctcccggcggagcggcagacagacgggcgtacaccgccccgcggaacgtcacggaaatgaagctttgcgccctttgggaagaggtgctgaaaaacggcccggtcggtatccgggatcacttttttgagcggggcggtcattcgttaaaagcgacggctctcgtctcccgcatcgccaaagaattcggtgttcaggtgccgttacaggacatcttcgcccggccgacggtggaagagcttgcttcggttattcaggacttggaagagagcccgtatgaatcgattcagcctgcgcaaaaacaggacacctacccggtgtcttcggcgcagaaacggatgtatgtgctccaacagcttgaagacggcggtgtcggctacaatatgccggctgtgctggaactgacgggcccgcttgaccgcggccggctggaggagacgttccggcagcttgtggagcggcatgaggcgctcagaacgtcctttgaaacggggcctgacggcgaaccggtgcagcgcatccatgacagcgtgccgtttcagttggatgaggccgagtcagctgacgcattcgtccggccgttttgtctggaggaagcgccgcttttccgtgcggccctcgtgaaagaatcggacgaacgtcatcttttattaacggatatgcatcatattatttctgacggtgtgtccgtcaacaccttgattaaagaattcggcgagctgtacgcaggccgttcgcttgcgccgatgcgccttcaatataaagactatgccgtttggcagcggtcatttcaggagaaagaagggtatcagaagcaggaagcctattggctgaagcggcttgaaggagagcttccggtgcttgagcttccggctgacaagccccgtccggctgtcagaagctttgcgggcggcagcgtatcgtgcacgcttgacgctgaaacggcatccggccttcacggcattgcccgggatcacggctccactttgtatatggtgcttctcgccgcgtacaatacgctactcgcgcgcctgagcgggcaggaagacatcatcgtcggctcgccgattgccgggcgtccgcacaaagaccttgaaccgattctcggcatgttcgtcaacacgctggccatcagaacggagccgaaaggagacaaacggtttaccgattacttggcggaagtccgccaggcggcgcttgaagcgtatgagcatcaggactacccgtttgaagagcttgtggagcggctcggcgtgcagcgggacacaagccgaaatccgctgtttgacgccatgcttgtcgtccagaatatagagcatgaggaactgctgttggacggtttgcatattcagaatgcggacgtgtcccgtccggtttccaaatttgatgtcactttgcaggcttctgaaggcgggggacagattcattttctgtttgaatatgcggcgtctttattccggaaagaaacgatgcagcgctgggcttcccactttatgacgatgcttgaacacattgtccgtgaaccggaaacttctttacaagcgatcagcatgctgactgctccggaacggaaccggattctttcggactttaacggcatgacggatcaacagctgcctgaaaaaacagttcatgaactgttcatcacccaggcgcgaaaaacacctgatgccgcggcccttatcagcggggaaacattgatcacatacaaagaattagatgactggtcgaataaaatcgccagagccctgcaaaaacggcagatcggacctgatgcagccgtcggcattgtgataccaagatcgccggaacaagtagcggcagtcttcggggtgtggaaagccggaggagcctacgtcccgatagatcctgaatatccggaggaacgcaagcaatatatcatctcagacagcggcacagcgcttctccttaccgcacacggtgcgatagaacaagtgcctgatcgttttaacggtgaagtgctcgcactggaggatatccaagaacaggatgcttcgccggtccagtcattatcagcaccggaagatttggcttacatcatttatacatcgggaacgacaggcaggccgaaaggggttatggtcgaacatcgatccgtcagccaaacccttcaatggcggagcggattttatgatctgaatgagaaagatacgattcttcagctcttttcattttcatttgacgggtttgtaacaagcatgttcacaccgctgatttccggtgcgaaagcggccgttttagccgaagacgaagcaagagatattcttgctattaaacactatcttgcatcttaccgcatcactcacatgatcattgttcccgtactgtaccgtacactgcttgacgtactggagccgggggatgcagagtctctcagaattgtcacattagccggagaagctgtcgaccaaaacattatcagccgcagtttatcagtttgtccacacacggagcttgccaatgagtacggcccgacggaaaacagcgtcgccactacagcggcaagacatatagaacaaagtaagaacatcacgatcggccgtccgattgagcattcacacgtttatattttaaacggagatcatccgcagccgatcggcgtaacgggagaactttgcatttcgggttccggccttgcaagagggtaccgcaatcttcctaagcaaacggcccaagcctttgtccaagacccgttccagaagaaccggcgcatgtaccgcacgggcgacctggcaaaatggctgccggacggcacgctgcaatatatcggccgaatggacgagcaagtcaaaatcagaggctaccgggtggaactgaaagaaattgaatccgccttaacaggcataaaaggagtcaaagaagcagccgtcaccgctctgcccgcatcagcaggccaaacggaactatgcgcttatatcgtgacagaagaaggaacagaaagtgaaaccgtgcagaaagcactcagaaatgaaatgcccgcttatatggtgccggcgttctttgaaacacttgaagccctgcctgtcacaccgaacgggaagcttgaccgccgcgcgcttcctgagccgcggaaaaaagcgcacaccggacgggcatttaccgagcctgaaagcgacatggaaaaagaactgtccgcgatttggagcgaagtgctcggaactgaaaacattgccgcggatcaatcattttttgaactgggcggcgattccatcaaagccctgcaagtatcagcccgattacatcaggcaggaaaacagatcgccgtaaaagatattttcagccggccgacaattagggagctggcgccttatgtccgtacagagcggcagccggtcagccaagctcctgcagcaggagaagtgaagtggtcgccgattcacaaatggttcttcacacaagacatgaaggaagcaaatcattttaaccagtccgtcatgctgacgagagcaaattcaatagatgaagaggctctgaggaaaacgttaaaagctattaccgttcatcatgatgccttgcgcattgtctgcaaaaaagacgaagagaaaggtcttctcctcttcaacagaccggctgacctcgcagatgagcagctttacagcctgaccatattagaaatggaaggcgatgagcatgagaaggaacgttttgtaaaacgccgcgtcgcagagcttcagagaaacatggatttagagaacgggccgcttgtacaggcggggctgttccgctctgaagcagaagattacttgtttctgacggtccatcatctcgctgtcgacgggatatcatggcggattttattggaagacttggcttctgcttatgaacaggccatctctggacaggaaatcaaactccctccgaaaaccatgtcattcaaaacatatacggagcagctggccgattatgccgaaagtaaacagcttcttcagcaggcggagtattggcgggagattgaacactatgaaacagaaagtcttccttacgaacaggcagatttatctcaagctcctgcaaaaaaacggaacacggtatccttcactctgacagaaagtgaaacggacgccctgttgaaagatgtacacagcgcctacaatacggatacgcaagatgtgcttttggcttccgccgtgcttgccattcaaaagtggtcgccgcggcacgctttgaaaatcgcccttgaaggacacggacgccaatcggagcaggcaggtgcggacatcagcaggacagtggggtggttcacttccatttacccggtgcttttccggagcggagtttatgaacctcttgaagaaaatgaaattcgcacattgaaaaccgtcaaagacacattgcggcgcattccggataaaggcaacggatacggcgtcctcaaatatttaacaccgccgaagcttgccgggatgactttcgggaaagcaccggagatcagctttaattatctcggacaattcgatgcgcccggcgggaacccggcagaaacggaacagcctgacgcgtttcagttttctcctttgggaggcggagatgatgtgacagatacatggaaacgggagcagtcacttgaaatcagcgcgattgcggcaaaaggccggatgaccgtcagtatttcctatgaaacggagcgcttccggcaagatacgatcgaacagctgtccgaaagctgccggtattatctcctgaaactgtcggaacactgcctcggcaaaaccgatacggagaagaccgtcagtgactttgatgatcgggagctgactgaggaagcattgcaggatattgccgacttactcagcttccactaaaccgagcgggaggaacacatggacaaaacaaaaaatatccaaaatatttatcccctcagccgaatgcaggaaggaatgctttttcattcctttctgcaaaaggagggggctgcatatatcgagcaatccgtcttcaccataaaaggccggcttcgtccggaattgtttgagcaaagcgtacagtctgtcatcagccgtcacgatattttcagaacggtttttttacctcatgtcgctcagctgaacggcccccgccaagttgtgctgcgtgagcgggaattccggctgcaccgcgaagatcttacacatttggacgaagcggaacagagcgcctacttacagcgatttaaggaacgtgaccgcttaaaaggctttgacttgcaaaaggatatgctgatgcgcgtttctttgtttaaaacggctgacgaaaaatatatatgcgtctggagccaccatcacatccttatggacggctggtgcctcggcatcgtccttcaggaattcatgcatatgtaccgggcgattgaatcaggctcacccgtcacactggcacccgcaaagccttacagcacttatattacatggctgactgatcaggacaaagacgcggcttctgaatattggaaaggatatttagcaggctgcgagacaccctcaggactcccgaaaatatcggcccgtccccaggaaaaaggctaccgcaaggaagagctgctgttttctttagatcaaaacctgacggacaagctgaaaaccatcgccaaagaagagggcgctacgctcgctgttcttatgcagactgtatggggtctgatgctgcagcgctacaaccggacggacgatgccgtattcggcgccgtcgtatcagggcggccttccgtcattgacggcgtggaaagcatgatcgggctgtttatcaataccgttccggtacgcattaaaacgggtgacgaaagctttagagaactgctgggccgcttgcagaaagaaatgcttgactcagaggcgttcagctatcatccgcttgctgacatccaatcgcagactgagctgaaacaggatttaatcgaccatattatcgtgtttgaaaattatccgattcagcagcagatgaaagacgcggaaaaggaatcggatgcaccattccggatcgggaatgtcaacgtttcggaacaatcgggctacgattttaacctcatcatagcgcctggcgatgagctgctcatcaaattcagctacaatgcgaacgtttatgacgaagtatggatagagagcgtaaaaggacacttggaagaagctctgcgcggcgccgccttcaatcccgatgttcccgctgatcggcttccgatgctcggacaaaaggaaaaatcaagaataatcggcgaatttaatgacacgaaaacaacttatgaaagagatgaaagcatcatcagcctgttcagccgacaggtgaagaaaaccccgaaccatcaggcgcttcacgccggcgggctgacgatgacgtaccgggagctcgatgaacggtcaactgcattcgcccgcaccctgctggaaaacggtctggcgccaaagggaattgccgggattctggccgaacgctcaccggaatttatcatcgctgttctcgctgtattgaaagcgggagggacgtaccttccccttgatgcagaactgccaaccgacaggatcgccgatatgctcactgagagcggagcacagctgttaacggtacaaaaaggaattgagactgacattgacttttctcacatcatctctatcccggctgcagctgaaaaacaaacacctgatgcgggaaaactgaataccgatacagcacctgatgaccttgcctatattatgtatacatccggttcaacaggaaaaccgaagggcgtgatgatttccaaccgaaacatcatatcgctcgtgtcaaacagcaattacacgtcggctggcatgtcggaccgtctcattctgacagggtccatcggttttgacgcagtgacgtttgaaatcttcggagcacttttgaacggagcatgtcttcatgtggttgaccgctcgacaatgcttgcccctgagaggttcggcaattatctttcttccaaccggattacgattctgtttttgacgacggcactctttaaccagttcgcccaggcagatcccgagatgttttctgggttgcacaccttatatgtcggcggagaagctttgtccccggcgctcatcaataaggtcagacaccgctgtccgaatctcagcctttataacatatacggaccgacggaaaatacgacattttctaccttttacgaaatcaggcacgatttttctcagccgatcccgatcggaaaaccgatcagcaattcaactgcgtatatcattgataaaaatggcggacttgcgccgatcggcgtgcccggtgagctttgtgtcggcggtgacggggttgccaaaggctatttaaacaggcctgacttaacaagtgaagcatttgtcagccacccggttcatcctgaagaaaagatctacaaaacaggcgacttggcacactggctgcctgatggaagcatcggatacatcagccgtatcgaccgccaattcaagattcgcgggaagcggattgagccggccgaaatcgaagcgcgcttgactgaaattgatggaatcagggaagcggcagtcatcgtgtcagatgaaggacaagaagcaatcctttgtgcgtattatacgggcgcacatgttgaagaaagagccattcgatccctgttggccaggtcgcttcccgactatatgattcctcagtatgtgatgaagcttgaccgtatgccgcttaccgcaaacggcaaagtggaccgccgcgggctgcctgcgccggaacggaaaaaaacgtcatcaaaagccgttccgccacgaaactgggtagagcgtgagctgatcgacatttggacgccgatcctcggctgcagggagctgggcatacaagatgacttctttgagctgggcggccattctttgaaagcattgcaagtgattcatcagctgaagaccaggcagcagatggatgtgccgattgaaatgatatttgaatatccgacaattgaacaattggctgaaaagctgtattcaaacacactgacagaagctgcagagcagcatatcagcagactgaaccagccgaaaggccgaaatcttttctgttttccgcctatctcaggtttcgggattttctttaaagatcttgcggcggcattaaacgaacgggctgctgtgtacggttttaactttattgaagaagacagcagaatggaacaatacattgataaaatgctggaaatccagccggaaggcccttatattctcttcggatattcggcaggcggcaatacggcattcgaggcggcaaaagcgatggaaaagcgcggcttagaaatcagcgacgtcattatcgcagacgcgtacagaaagcttgacacattggcgccgcagccaacaaacgcgacagccgaaaatgtcccggaagccgtcagggaagcggtcatccgaaaaacagagcgctatcaaacgtactgggcggaactgataaatgacggccaaatcgcggcaaacctccattttatcgaggccggcataaaggaagagcacagtgataagaccgagccgatgaaatgggaaggcgccacaacgggactctatcaggaatatcaaggcgggggcgcccataaagatatgtttgaacccgcctttgcacagcaaaatgctgaggtcatactcgacatcattgcaaacagcggaagacgcttggcgcggaatctgtaacatccggcagaatggttcaggatgacagagggcaagataggggaatcaaaccagttttttggaggctttgacatgacgaacctatcttggcttacgtatgtaatgattattcttgccagctaccggctgacccatttgatcgtatttgataagattacggaattcataagaaaaccctttataaagcaagaaaaaaccgtcgatcaaaacgggcgcgccgtccaaaaaaaagttccttcctccgcattcggttatatgctgcaatgttattggtgtgcgggcgtctggtgcgccatattgatcggcatctgctacttggtctggccccgctatgcacatccggttattttcattttgtccatcgccggagcgcaggccattcttgaaacgtgtgtcggcgtcggaacgaaggtcattgacgtgctcgccgccatgaaacataaaaagtcctgaagcgttttgattcgctttaggacttttttctttcccttttaggctgagaggagcaaagcaggctttctgattcaccgcccggaatgcttcggaataccgtaaagcagagagggggaaaaacatgaaaagctgccgttttagcatgatatggtttttggccgttgtactgacagccggcatctttacattctcagcatccgcacaagcaagcggcactcagccggagagagaaatgagagccgtatggatcgcgtctgtcaccaatatcgactggccctctaaaaaagggctgtcaccggaagagcaaaaaagagaatacagcaagctgctggatgacgttcaggagatggggatgaacgccgttatcgtccaaattaagcctgcggctgatgctttttatccatcagattacgggccttggtcagagtatctgacaggaacacaaggcaaaaatcccggctacgatccgcttgcttttttagttgaagagacacataaacggaatcttgaatttcacgcttggttcaatccttaccggatcacgatgaatcacacaaatttgaatgcgctttcagatgatcatcccgctcgttcgcatccggactgggtcgctgcatacggaaaacagctgtactataatccgggcattccggaagtaagacaatttataacggatggaatcaaagaggtggtcagccgttatgacattgatgcggttcatatggatgattatttttatccttataaaattgccggacaggaattccccgatcaggcggaatacgaacggtacggaaaagctcactttgcatcagttgatgactggcgcagggataacgtcaaccggcttgtaaaagaaatcaaccaaaccatcaaacgagaaaaaccttatgtcaaattcggtatcagcccgttcggcgtatggagaaatgccgcagatgacccgacaggctccgaaacggccgcaggggtgcggaactatgatgatttatatgctgatacgagagaatggatccaaaaaggatacattgattacatcgcaccgcaaatttactggagcatcggatttaaagcggcggcatatgacgtcttagcggattggtggggaaaagaagtgaacaatcggccggtgcatttatatatcgggcaggcagcttataaaatcaacaacaacgctgatccggcctgggccgacccgggggaatacggaagacagattgctcttaacaggggatcagcttggattaaaggcagcatgcatttcagtttaaaggatttaaaccgtaatccgctcgatgtgaaaaaccgtttgatcaaagacatgtacagccggcccgcattaattccggagatgccttggctcggacattccgctttaaaaaaaccggctgtcaagcgggcggagaagaacgcttcaggccatacactctatatcgaagatgcgaaatccaacggtaaaaaaacgacttattacgccatttaccgcgcagaaaagggaaagcagccttatttagtggatacagtcagaaaaacatcgtcacggacgcagacattttcagatactgatattcgggcgaaaggagcctgcacctataccgttacttccgttgacaggcttcaccatgagagccgtccctccgcaaaacggacaattaaatagccattattaataaaactgacagttgcggcgctgtcagtttttttgtagcagatgagtccgaatgttcagactttatttggatggaatgaataaagacccccattaataaaatgtagaaagcagcagaaggaggaaggttaatgaattttcaactgacaaaagaacagcagatggtgcgcgaaatggtcagagatttcgccaaaaatgaaattgccccgaaagcccatgaggttgatcaatcagccgtcttcccgatagacacatttaaaaaaataggcgaactcgggctgctcggaattccgtttccggaagaatacggcggggcgggcggtgacaccatttcatatgcagcagcggtcgaagaaatcggaaaagcctgcggcagcacggggctgagctacgcggcggccgtgtcactcggtgcaagcccattatactatttcggtactgaacagcaaaagcaagaacatcttattccgcttgcttcgggaaaagcgctcggatcattcgggctgacagagccgaatgcaggttccgatgctggcggaacccagacaaaagccgagaaaaagggcgatgactatgtgataaacggagagaaatgctggattacaaacgcaaattacgcccgcacggtcattgtcaccgccgttacgggaaagaactccgccggaaaaccgatcatttcagctctcatcgtcccgacagacacaccgggatttacgatcacaaatccgtacgacaagatgggtgtgagagggtcggatacggccgagcttgtgctggaggatgtcagggtgcctgccgataacctgctcggtgatcctgaaaaaggttttaaacaatttttatatacattagacggcgggcggatctcgattgcggcactggctgtcggtatcgctcaaggcgcactggaggcgtcgctgtcatatgcgaaggaacgcaagcagttcggcagtccgatatcgtcatttcaagccattcaatttaagctggccgatatggcgatggaaattgaccttgccagacagatggtgcttaaagcggcatggctgaaggatcaaaacctgccatttacgaaagaagctgcattcgccaagctttatgcttcagaaatggccgtcagaacatgtcttcaggccatccaaattcatggcggttccggttatatgaaggaatgcggtgttgagcgcatgcttcgtgacgcaaagctgatggagattggcgaaggaacgtcagaaattcaaagaatggtcatcgcaagacagcttttgaagtgaaatgaaaacgtttactaagacagagatggaaggggggcaggtcatatggctgaacttatccatttaacagccggaaagctgcttgagcggaccgcgaagctttttccggatcgtgaagcggttgtttaccctgagcgcggccttcgttatacgtatgccgagtttgaccggttatgccggcaaaccgcaaaagggctgttgaagctgggagttgaaaaaggagatcatgtggccatatgggcatccaacattccggaatggctcgcggcgcaatttgcaacagcgaaaatcggcgccgttctggtcaccattaataccaattttcaaatcgcagagctcgattacctgctggcacattcagacgtctcggccctgataatcatggattcctaccggcagacatcttatgttgaaatcgtgaataagctgattccggagctgaaaacttgtaagcgcggcaggctgcgttcgaaacgttatccatttttacggacggtgttatatatcggtgataaaagcccgcccgggatgcaccgttgggattcattgctggataatgccgagtctgtaacggatgcagcgcttgacggaaggatggacagcctgaaaaaggatgattgcattcatatgcaatatacatcaggtacgaccggatttccgaaaggcgtcatgctctcacattttaatatcgtaaataacgcggccaatatcgcagaatgcatgaagcttacttcatgtgaccgtttatgtattcccgtgccgtttttccactgctttgggtgcgtgctcggcgtgctggcatgtgtttccgcgggtgcggcgatgattccgatcgaacagttttctccgccggccgttctgaaaacggtggagcaagaagcctgcaccgctctgcacggtgtaccgacgatgtttatcgccctcctaaatgacagccgtttttctgaatatgatctttcccacgtccgaaccgggattatggcaggctcgccatgcccggcggaagtcatgagagaagtgatcggcaaaatggggatgaccggcattacaattgcctacggacagaccgaagcatcacctgtcattacgcagacaagaacggatgatccgtttgaaagaagagtggaaacagcggggcgcgcgcttccccatatcgaagtcagaatcgttcggcccggaacatcccaagaagccgccaggggcgaacaaggagagctctgcacccgcggatatcatgtcatgaaaggctattataaaaatcaagaagcgaccgaagaagcgatagacaaagacggctggctgcataccggtgatttggcggtcatggacgaggacggatactgcaaaatcacgggccgtctgaaagacatgctgatcaggggcggcgaaaatatctatccgcgcgagattgaggaaatgttatatcggcatcccgcggtagcagacgttcaggtcgtcggcgttcctgatccgaaatacggagaagaggccgcggcgtggatcgggctcaaagacggacaaaccgcttccgcagaagacatcagaaccttttgcaaagaacatatcgcccgctataaagtccccaggtacgttttgtttacagatgaatatccaatgacagcctcaggaaaaattcagaaattcaagctgcgggaaaaaacgattgaagagctcaagttaacttaatgaaaaaggagtgcttcacatttgtttaaaaaagtcctgattgccaacagaggagaaatcgccttaagaattatccgcacctgcaaacgtctcggcatcccctcggcagctgtgtattcagaagccgaccgggacgcgctgcatgtaaaagcggctgatgaggcctatccgatcggtaaatcgagagtaaatgaaagctatttacatatcgacaaaatcatagaagccgccaaatccgccggagcggacgccattcatccgggctacgggctgctgtcagaaaacagcctgttcgccgaacgctgccagaaggaacaaatcacatttatcggtccgcccggtgatatcatcgccaagatgggcagcaagattgaagcccgaaaaacgatgcaaaaagcaaaggtcccgatcgttcctggtgtttcagagccattgcccgatgttcactccgccttagccgaagcccgtgccatcggttttccggtcatgctgaaagcgtccgcaggaggaggcggaatcggcatgcagatcgtacattcagaagaagagctggccaaagcgtttgaaggcaatcaaaagcgggccgcctccttttttggagacggcgcaatgtatatggaaaaggtcattgaaaatgcccgtcatattgaaattcagatactcgcagattctttcggcaacaccgttcatctgtttgaacgtgactgttcagtccaaaggcgccaccaaaaagtgatagaagaagcgccgtcgccgtttgttgacgatgaattaagacaaagactcggtgaaaccgccgttaaagccgctaaatcgatcggctaccaaaatgcaggcacaatagaatttctcgtcgacgaaaagaaacaaatctattttttagagatgaacacaagactgcaagtggagcatccggtgacagaagaaattacaggactggatcttgtggaagaacagctgaaaattgccgctgggcaggcgctgcctttctcgcagaaagatatcaaccaccgcggtcatgcgatagaagtgcggatctatgcggaagatccggtcaccttttacccgtcacccggtaccatctcgtctttttccgttttaagacacccgtcagtgcgacacgaatgcgccgtcgaaaagggaagcgtcatttctccgttttacgatccgatgattgccaaaatggtcgtcacggcgaatacgagaaaacaagccattgaacaactgaaaaccgcccttggcgaatatcatgtagaagggattaaaaccaacattccgctgctgacaaaaattgctcattcagaagtgtttgaaaagggcgaggcaacaaccggttttttacaaacaatgaacgagggggcgtccaaatgagcgtcataaaaattcaaatggcgggaaacctgtggaaaattcatgtgaagccgggtgatgtcattgaagaaggacaggaagtggccatcttggaatctatgaaaatggaaattccgattatcgctgatgcagcgggtacggtgaaagaagtgaaaaaatcagaaggtgatttcactgatgaaggagaggtcctgattgaacttcaataaaacgggaggtgcagcatgaactgtccgaaacatgtccgcatcaatgaagtaggaccgcgtgacggcttgcagaatgaatcggcgtgggtggatacagaagataagattgagtggatcaatatgctgtcaaaaacaggccttccctatatcgaagtgacatcattcgtgcatccgagatggattccggctcttcgtgacagcctggacgtcgcaaaaggcattaccagatctgaacatacggtctacgcggctctcgttccgaacctcatcggtctggagcatgcggcagaaggcggaatcgatcaggcatgtgtatttttatctgcaagcgaaacccataaccaaaaaaacgtaaacaaaccgattgaccggaccgttcaagagctcaggcgggttattactgaagcaaaagctgaaaaaatggcgacgagagcttatctgtccactgtgttcggctgtccgtacgaacagaacgtgccgatcgaacaagtcatccgcctgtcagacaccctgctcgaaatgggtgttgatgaaatatcgctcggcgacacgatcggcgcggcaaaccccttgcaggtcatagccgtgcttgaagcccttttgccgagaattcccgcctcaaaaatcgcactccatttccatgatacaagaggaacggctctagcgaatatcattcccgctcttgatatgggcatcacatcctttgatacttcctcaggcgggcttggaggctgcccgtacgcccctggatcagcaggcaacgctgccacagaagacgtcatttatatgctcgaacaaatggggattgataccgggacggacatgaataaacttctttatgccgcaggctggatcgcggataaaataggcaaagacctgccaagcagaaacctgcaggcattcagaacgaaatgagaaaggagaagccatgggagattgcgtcttgtattccgtctgtcaagaaacgatcggtctgatcacgctgaaccgcccgcatgcggccaactcgctgtcttcagacatgattgatcatttacagcgtgtgattgaagacatcaaaaactcgccatccattcgttgtgtcattctcaccggcaccgggaacacattttgcgccggtgctgatttaaaagaaagagcggggatgaatcatgaacaagttaagcaaagcgtcaggcgtatcggtgaaacggccgcatccattgaagctctcccgcagccggtcattgcagcgctgaacggaaccgctgtcggaggaggccttgaactcgctctcgcctgcgatatcagaacagccgtcagccaggcgggcctcggccttcctgaaacagggcttgcgatcattcccggagcgggcggaacgcagagactgccccggcttatcggccccggcgcggcaaaagaattgatctataccggccgaaggctttctgccgaagagggaaaagacatgaagatgatcgagcatgtttgtgaagccgatgaacttatggaaaaagcaaaagcactggccggccgcatcgccgctaatgggccgatcgccgtcagacaagcaaaatccgcgataaacaagggtctggagacagatctcaatacagggctcgaaatcgaacgaaaagcatatgaacaagtcatccccacacttgacagagaagagggcctgcgcgcttttaaagaaaaaagaccccctgaatacaaaggaaaataaaacatggagggactcggatggattacgaaaaagaacggcagacacgcagcaaaacgattgaaaagggaggagccgcgaaatatcacgcaagcaacgaaaagaagggaaaactttttgtaagagacaggctgaagcttttattcgatgacggcatatccgttgaagacgcttttttcgccgagtgcatgtcagacggactgccggctgacggggtcgttaccgggatcggaaccatcggcggcagaaccgtttgtgtgatggcaaacgactcaaccgtaaaggcgggctcgtggggcgcgaaaacggtggaaaagatcatccgcattcaggagacggcggaaaagcttcagtgtccgctcttgtacttagtcgattccgcaggtgcgagaattacggatcaggtcgacatgttcccgggcagaaggggagccggccgcatcttttataatcaagtaaagctgtcgggccgcattccgcaaatctgtttattgttcggcccttccgctgcgggcggcgcttacattccggccttttgcgacattgtcattatggtcgaaggcaatgcatccatgtacttaggctccccgcgtatggcggaaatggtgattggcgagaaagtatcgcttgaagaaatgggcggcgcccgtatgcattgttccgtatcaggctgcggtgatctcctcgccccgacggaacaggaagcaatcatgatggcgcagacatatctcagctactttccggcaaattatactgaaaaagcgcccgtcaacaaatctaagaacccgaaagcttttgaaaaaccgctctcagatgtcatcccggcacatcaaaacgcaccgttcaacatgatggatttaattgaacgtgtcattgatgaagactcattttttgagattaaaccgttatttgcgcaggaattaataacggggcttgcgcggattcacggacagccggttggcattatcgccaatcagccgcgtgtcaaaggcggggttttatttctcgattcggcggataaagccgcaaaatttatcgctttgtgcgacgcattccatattccgcttctgtttttagcagacattcccggattcatgatcggaacgaaggttgagcaggcgggcatcatcaggcatggcgcaaaaatgatctccgcaatggcggaagcgactgttccgaagctttccgttatcgtcagaaaagcctacggtgccggattatacgcgatggcggggcctgcttttgaaccggactgctgtttagcgcttccgactgcgcaaattgccgtaatgggtcctgaagcagcggtgaatgcggtctacgcaaagaaaatcagcgagctagcccctgaagaaagaccggcttttattcaagaaaagcgtgatgaatataaggaagacattaacctttaccggcttgcctctgaaatggtgattgacggcattgttcctgctgattccttgcgggatgaactcaataaacgcctcactgcttacatgtccaaacaactgacattcacacaccggaaacaccccgtatacccggtataaataaaaaaaagactgcacagatccggctcacagccgttcttatgcagtcttttttcacagtcttgatctcattttctttacaacaaaataaacaacaataaatacgagcgccaatataatgatcggagttgtatacattccggcatagctgtctacgtctttccactgtcccccgagctgatacccgagataaacgaaaatgacagaccacggaataatggcaagcgtcgtcaatatgacaaacttggaaagaggcattttcgcaaggccggccgggatggaaatcgcatgtctgacgaccgggataaaccgcgccgagaacacaacgccggcgccgtaacggcgaaaccagttttccgcaacatcaacatgatgctttttcagaagtaagtacttgccgtacttgtccaaaaacggccgtcccccataacgggcgatccagtaaataaagcactgcgcgatcgttcccccgatcacaccggcgacaatggcgccgataaagctgatcgtaccttctgacaccatatagcctccgtaagccagaacgatttcactcggaatgatttcgatcattaatccgagcgcaatccctaaatagcccatacttgtcagccaggataatatttcactaataaaattgcccacactgttcacaacctctttatctttttacccaattatatgactgattgacaagcaaaatggttacaaattattttttagcgcacgatttcttcagattctctttttaacacctcttctaaataagctaaaagtttcggtctcatttcttcccgcagaagcccgatctccgtgccggccataaaacagccgaacttatctcctatatcaaaccggcttccttcaagctcccgcgcataaatgcttcgggtgcggcacacttcgcgcagcgcgtctgtcaattggatttcgttgcccgcgcctcttccgatcgtcttcagcgttttaaaaatagcaggggttaatatgtagcggcccatcacggcaatatgagagggcgccttttcaacagccggtttctcaatcagatcctcaacctggtatacatgaccgctctgccgccccgtctgtataataccatatttgctgacatcagcaggatcgacgggctgtacgccgatcgtttctgtgccgtgttggttatagacgtctatgagctgtgaaagagcgggagtgtcagataccataatatcatcacctaagagaacggcaaaaggctcatctccgataaaatgctccgcacacagcaccgcatgtcctaatccgagcggttctttctgacggatgtaatgaatattggccaaatcggcgatctgctgcatctccttcagcgtctccgtcttgcctttttcccgcagattgaattccaattccgccgaccggtcaaaatgatcttcaatcgagcgtttgtttctccctgtaataatcagtatatcttcaattcctgacgctgcggcctcttcgacaatatattggatggccggtttgtcgacaatcggcagcatttctttcggctgcgcctttgtcgccggcagaaatctcgttcctaaacctgctgcgggaatgaccgcttttctcactttttttctcattcatcttcactcctgatcctgtatgtttttcagcgaatctccaaatacccagattcggtttccgataaaattcatcatcattccgccgatagtggcggcgaacttactcaccaatagcgaacagccgcctttttgaaacgcgtaaagcagcaaaaaggtgattcccgacgcggcaagattaatcatgagaaatcgcatgatctctttcccgtcagccttgcgttttacacgaaacgtccacttccggttccatacatagctgttgatgatccctgccgaataggagcagatctgcgccggaagataggggacatgacaagcggcgagaagaaagaagacaccaaaatcaatcagcgtatttccgacgcctacagtgcaaaaacggcctgctgtctttactttttctttcagcataacggcatccggctttgacctcccttcataagtaagatgcggatcgctgtcctatttgttgatatggattactttaacggacagtgttgaataaacaattactaaaatatgaacaaaacatgaaaacgtaatgaggctttgcaaaactcattaagttaacagtttgatagtttaggttgacatattccgtgaggggcactaatattctgtataagtgttaacctttaattattttggttaacattaattttcaaagtaagagaaaggaggggaatatatgcgggaagaaacctattacagcgtcagaatgagagcttcccgaaacgccccccatgagcagggcggaaaacacatttccggcggagaacggctcatcacttacggcggtttacaggaagcggtagatggcttattacataaaggcttctcgcactcaagagggatacctgattttatgcaaattcagcttgaaagcgttaatgaaccgatcgaaacgatccgccctttgccggttgctttccatcaaacagacacgccggaaaaaggacaagcgatcgcccgcaagcttctgcaaaaggcgggaattcccccgcacatgatagagaaagcgtacgaaaacattgcggaatatgcagacgcaagaggagcggtcctgtttgatatccgggcaggaaaacgcattgacggcagaggaaatagaggtgtgcgggtatcccgagtggattggccgtcacatgattttcaaaaatgggcttttacgcacaacatgccggaacattcacgaataaaagaagcacatgccatcgcggcaaaagtttgcgcacatccggggattattgctgaattgtgctggtcggatgaccctgattacataacaggctacgttgccgcaaagaagctgggatatcaacggatttccaagatgaagaatgccggagatgaaagcggatgccggattttctttacagatggctccatagatacggagagctgtatccattttttagagaagcagcctgtattcattcagcgggaggggaacatatgaaacaatcaatgatcgaaaaaagcaaacagcatctttggctgcctttcacacaaatgaaagattacgatgaagatccgttaatcattgaaagcggaaacgggatcatgctgaaagacatcagcggcaaagaatattatgacggcttttcttcagtatggctcaatgtacacggccaccgcaaaaaagaaatggatgaagcgattcaaaaacagcttgaaaaaatcgctcattcgaccttgctgggtatgacgaacgttcccgcaacagaacttgccgagatgctgacaggcatcacaccggaaaagctgacacgcgttttttactccgacagcggagcggaagcaatggaaatcgctctgaaaatggcctttcaatactggaaaaacatagggagacccgagaaacagacgtttatttctatgcagaacggctatcacggcgatacgatcggagccgtcagcgtcggctccattgaactcttccaccatgtgtacggcccgctgatgtttgaaagctacaaagccccgattccgtatgtatacagatctgaaagcggcgaccccgtacagtgccgggatgaatgccttcacgcgctcgaacagctgcttgcaaagcatcacgaagagattgccgcacttacgattgaatcgatggtgcaaggcgcatccggcatgatcgtcatgcctgaaggctttctggcaggcgtacgaaagctgtgtacggcatatgatgtgttaatgatcgttgacgaagtggcgacggggttcggccgcaccggaaaaatgtttgcctgtgagcatgaaaatgtccagccggacttgatggcggcagggaaaggcattacgggaggctatttgccgatcgctgtgacgtttgccacagaagccatttatgaagccttctacgatgactacgacaaaatgaaaacatttttccacggccattcctatacaggaaatcagcttggctgtgccgcggcaattgaaaatctgcgtttattcgaatcagagcgcatcgttgatcaagtcgccgaaaaatcaaaaacggcagcggaatttcttcatgatttgaagcagcttcctcatgtcggcgatgtccgccagctcggtttcatgtgcggcatagagcttgtgcgggataaagagacgaaacagccttatccgcctgaaaagcggatgggatacaaggtgtccttgaaaatgagagagcttggtatgctgacacggccgctcggagacgtcatcgcctttctgccgccgcttgccagcacaaccgatcagttacaagccatgatctccattatgaaagaagcgatagccgaggtgaccggccgtggattttgacggatggctcctcggaaggctcgatgcggtgaaaagagacgggctgtatcggacgctgcgaacacaggaaaccgctctcaaaaccaaggggcaaaagcggcagacctgggcgtccaatgactatttaggcctgtcaaaagatgagcggctgatcacagccgcgcaaacggcgctgagccggttcggagcgggaagcggcggctcacggttaacgacaggaaatactgtgtggcacgaaaaactggaacacacaatcgcggactttaaacagacggaagcggctttattgttttcaagcggttacttggcaaatatcggcgtgcttgcctcactgcctcaaaaaggcgatgtcattttaagcgatcaactgaaccatgcgagcattgttgacggctgccgtttatcaaaagcggaaaccatcgtgtaccgccatattgatatggctgatcttgagaaaaaacttgcctccgtccaggctcggaaccgccgctttatcgtcacagacggcgtcttcagcatggacggcaccattgcgcctcttgaccgcataatggcgcttgcaaagcagtaccaggcatttgtgatagcagatgacgcgcatgcaaccggtgtactgggggaaaacggcgggggaaccagtgactatttcggtgtttgtcctgatgttgtcatcggcacattaagcaaagctgtaggaacggaaggcggttttgccgcgggatcaaacattttcattgattttttgctgaatcaggcgcggacgtttatttttcagacggccctcccgccgtcaatttgtgcggcttcgcatacggcatttgacatcatatcagatatgcacgatacgcgccgtgagctgcagtcgtctgtcaaaacgataaaaacgcgtctggccgatatgggctttaccgtaagaggcggagatacaccgattatccccgttatcatcggtgatgcaaaaacagcggtttcagccgctgcgctgctggagaaaaagggaatctgcgccccggccatccgcccgcccgccgttccggaaggcgaaagcagaatcaggctgaccgttacggcggatcgcagcttacaggacatagacgagctgacagaagcatttgattccattagaaaagagctgaatataaacaaatgagaagtttttttgtcacaggaacagataccggcgtcggaaaaaccatcgtttcttgcggacttgccgcggcattccggcagaaacaggcggatatcggagtgtttaagccgtttttaagcggcgtgccgcggactcatccggaaagtgacacctcgctgttgaaagacatgtcacaaaccgcactgtctcatgaagaaatcacgccatttgaatggaaagagccgcttgccccgtacacggccgccatgcttgaggggaaatccgtgagcatggcggatgtcatggcccactggagtatgattaaaaatcgtcatgagtgtttcatcgtcgagggggcaggcggcatttccgtcccgcttggtgaaaattacttagtcagtgatctgataaaagccatggaattgccggcagtgattgtcaccaggcctgatctcggaaccatcaaccacacatatttaaccgttgaatatgcgaaaaacatggggatagaggttctcggcattattatcaacggcgtaaagagccggccggggctggacgaaaagacaaacccgagcatgattgaaacattatgcaaagttccgattttgggaatcacaccgaagctggatcacgtttcaccggaaaacattcaacacatgattgagaaacatatagatgtttcctctttcatgaatctgacacaaatggggagataaacatgaatcaatggatggatcttgcagagagagtgctggacggggcggaagtaacgaatcaagaagggctggccattttaaattgtcctgatgaggatcttttattgctgatgcatgccgcttttcatatcagaaaacgattttacggaaaaaaagtaaagctgaatatgattatgaatgcaaaatcaggcctgtgtccggaaaattgcgggtactgttcacaatcttcaatatcaaaagcgccgattgagtcttaccggatggtggataagcatatattgctaaagggggcaaaacgcgcccacgacctgaatatagggacatactgtatcgtcgccagcgggcggggaccgtcaaacagagaagtggatcaagttgttgatgctgtcaaagaaattaaagaaacgtacggtttaaaaatctgcgcatgcctcggtctgctgaagccggaacaggcagagcggctgaaacaggcaggagtagaccggtacaatcataacatcaatacatcacaaaggaatcacccaaacattacgacctcccacacgtatgacgacagggtcaatacagtggaaacggcgaaacaatcggggatgtcaccttgttctggtgtcatcgtcggcatgaaagagacgaaacaggacgtcattgatatggcgaacagcttaaaagcgcttgacgccgacagcatcccggttaattttctgcatgcgattgacggaactccgttagaaggggtaagcgaattacatccggtgtattgcctgaaagtgctcgccttgttccgttttatcaatccgtcaaaagaaatccgtatctcaggaggccgggaagtcaaccttcgttcgctgcagccgctgggactttacgccgcaaattcgattttcgtcggagattacttaacgacagcagggcagcaagaaacagaggatcatcaaatgctccatgatttaggttttgaagtcgaatccgttgaagaaatgaaagccggcctgcaatccgcctgcaatacggaggtataagatgacggcggacctatcgattgcacatccgtctctccatgcggattcggatttttggaatgacccttacccgttttatgacaaactgcgatccattgatcctgtttataaaggaaccgtattaaaatatccgggctggtatgtcaccgggtacaaagaagcggcagcgattctgaaagacattcggtttaaaaaccgcattcctcttccggaagcttcaacgaaatatcaaaatctatcgcatatccagcacgatatgctgttatttaaaaatcaatcagaccataagcggatgcggatgcttatcggtaaagaatttaccgcaaagacggcggaatctcttcgcccttgtataaaagaaacggttcatgacttgttggatcaagtccaaatcaaaaaaaccgcggaccttgtttcagagtttgcctttccattggcaagccttatcattgcggagatactcggagtgccgaaagaggagagatatcaattcagacaatggacggcagacgtcatccaggccattgatcttacccgatcaagaaagacgttagtcagagcaagcgacaccgcaggcaggctgacgtcatatttcaaagatttgattcacaagcggaaagcgcaccctcagcaagacttgatcagcaggtttattatggaggaacagctttcaaaagaggaagtgctcgcgacatgtatcttacttgtcatagccggacacgagacgacggtaaacctcatgagcaacggtgtgtttactttattgaaacaccctgaacagcttagcgcactgagagaaaacccctcgcttattgaaactgcagttgaggaatgtttgcgctacgacagccccgcgcagctgacggcacgcaccgcttcagaagactgtgaaataaatgggaaggccataaaaaaaggagagcaggtatatatccttttaggtgcagccaatcgcgatccaagcatattcgatcaacctcacaaaatggatatccaaagaaaaccgaacccgcatcttgcattcggaaagaacgcccatttttgcataggctcctcattagcgcgcatcgaagcacaaattgcaattctcacactgtttgagcggatacctaagcttcggctggctgcacaccgccttgaataccgcaagctcattggttttaggtcgctcaaagagctcccggttgtcattggctgaatgaccatgcaggagggccggattttatcggttcctcttgcaggaaataaatgaaagaaaaaagaatacatatttataaagcaaaaatcctctctgatccatctcactatccctaaaaaaactcactgctcagccaatcaatctaatacagcaagggcctccttttctttcgccaaaacggaacattcaccatgatgcacattttttcagcctcagaaactgtgcaaaaccggcatgttttttgctttattttctcgattctttgtaagcgcttactaatattgagcagaaaagagggggatttgtggacattgttattattttattggcattaggcatgctgatgtttgcggcttaccggggcttttcagtcattttattcgccccgatttgcgcgctgtttgccgtgctcctgacagatccaagcttcgtacttcctttcttctcgaatatatttatggagaagatggtaggatttattaagctgtattttcccgtatttcttttaggggccgtttttggcaaggttgttgaaatatccgggctcgccgagtcgattgcaaaaacaatcgtcaagcttgtgggagcaaaaagagccattctcgccatcgtcttaatgggtgcgattttaacgtacagcggcgtcagtctcttcgtagcggtgtttgccatttatccgtttgctaaaaacctatttattaaagctgatattcccaagcgtctgatacccggtacgattgcattgggcgcctttacatttacaatggatgcgcttcccggcacaccgcaaattcaaaatgtcattccgaccgctttttttaaaacaaacatttatgccgctccctggctcggactgattggtgcagcatttgtgcttacggccggaatgatttatttagaatcccggcgcaaaaaagcggccaatgccggagaaggctatgctggatttcaatctgaagtttccgctgcagaggaatcctcaggtctggctaatgaaacacatacgcctgttttaccgcaggaggcagaacccagccccgcgcggcaagtgctcgcctttgttccgcttatccttgtgggagtcatgaacaaatgcttcacgatgtggctcccgcattggtaccctgacggatttgattttgcgcccctcggtttagaagcgttcgggaagattgacctttcctccgtcactgcgatctggtcagtagaactcgcactgttcatcggaatcatgaccacgattttgttcgattggaaaaaagtcctcttcaatttgaaagaaggactgaatgagggcatcgggggcgccttgctggcgtcgatgaatacaggagccgaatacggatttggcggcatcattgcggcgcttcccggctttaaaatggtcagcagcggcatatcgcagacgtttacagatccgctcgtcaacggagcggtgacgaccactgcgcttgccgggattacaggatcggcatcaggaggaatgggcatcgctttaagcacgatgtcagcagcgtatacagaagcaatcaatacattccacatcccgccggaagtcatgcaccgggtgatctcgatggcctccggcgggatggacactcttcctcataatggcgccgtcattacgctgctcgcggtcaccgggttgacccaccgccaatcctacagggatatctttgccattaccgtcattaaaacagccgctgtgtttgtcattatcgccatttacagtctgacgggccttgtgtagccaaaacagaaaggggaaacgaatatgggaaaaggaaaagtgatggactcttataaagatgctgctgcactgataaaggacggagacaccctcatcgcaggaggcttcggcctgtgcggcattccggaacaattaattctcgcgatcagggacagcggcgtgaaaaacttgaccgttgtcagtaataactgcggtgttgatgattgggggttaggcctcttgcttgcaaaccggcagatcaaaaaaatggtcgcatcctatgtcggagaaaataaaacctttgaacggcagtttttaagcggggagctggaagtcgaattggtgccccaaggaacgctcgcagaaagaattcgcgcgggaggggcgggcattccggcgttttatacacctgcgggcgtcggaacatcagtagccgagggaaaagaacataagacatttgacggacgcacctatcttctggagaaagggattacagggaacgccgccatcgtaaaggcctggaaagccgatcctctgggcaacctgatgttcagaaagacggcgagaaatttcaatccgctcgctgcaatggcaggcaaagtgacgattgcagaggctgaagaaatcgtcgatgccggagagcttgatcccgatcaaattcatacgccgggtatttttgtgcagcacgttctgcttggcgggattcatgaaaaacggattgaacgctgcaccgtccggcaagcatgataaaggaggctgacagaatgagagatagcagaaaacgaatgatcaaacgggctgtaaaggaaattaaggacggtatgaatgtgaacttggggatagggatgccgacgcttgtagccaatgagataccgaatgattataacgtcctgcttcagtctgaaaacggcttgctcggaatcgggccttatccggcggaaggaacggaggaccccgatctgatcaatgcgggaaaagaaaccattaccgaggtaaagggagcctcgtattttgacagtgccgaatccttcgccatgattcgcggcggccacattgatgtagcgatcctcggcgggatggaagtgtccgaacggggagatttggcgaactggatgatccccggaaaaatgatcaaaggaatgggcggcgccatggacctggtgcacggagcaaaacggattattgtcattatggagcatgttaataaatatggggaatctaaagtgagaacggaatgtacgctgcctttaaccggcaggcaggtggtcgatcggctgatcacagatttggctgtattcgattttcatgatggccgtatgacgctcaccgaactgcaggaaggtgtaacaatggaggaggtctttgagaaaacagaaggtcattttactgtcagccagtcgttaaaaaacggggtcagaccaaaatgaggaggtgccgccatgcattcattgcttattgaaaaaacagccgttgtaacaggagcagccggaggaatcgggcttgaaattgcaagagaattcgcccgtgaaggagcagccgtcatcatctctgatgtaaacgaacaagcggggaaagaagcggcggcaagactgaaagatgaaggctgtgaagcagtcagcatcacatgcgatgtaacaaatgaaaagcaagtggccgacatgctgcagacggtcgagaaacaattcggacgtctcgatatccttgtgaataatgcgggcattcagcatgtcgcgcccatcgaggaatttcccaccgaacagtttgaacggctcattcgtgtcatgctgactgcgccatttatcgcaatgaagcatgcattccccattatgaaaaaacatcaattcggacgaatcattaatatggcgtctgtcaacgggctgatcggttttcacgggaaagcggcatataacagcgccaagcacggcgtcatcggtttaacgaaagtcggcgcacttgaaggcgcggctgacggcattaccgtcaatgcgctttgtccgggatatgtggacactcagcttgtccgcaatcagttaaaggacatttccgcaacaaggaatgtaccgtacgagcgggtgcttgaggacgtcatctttccgctcgttccccaaaaacggctgctgtcagtgaaggaaatcgctgattacgccgtatttttggccagcgacaaagcaaaaggggtcacaggtcaggccgtagtcatggacggcgggtataccgctcaatagttcttgtactatttaaaaaacagccgctctgaacggctgtttttttatgcctgaaaaccttgttcactcaataggccgatttactgcgtcaatcggtatccgggctgggtcatttacttgttctgcggcgtattttgtccttgcagattttcctcaccagatccatctcttgcgccgcatttataatcaaacgccctcagtttacaatccttcacagatatacaaatgaatttttacaataaacagaaaatatgtaatttctgacacaataatgccaatagccctaaaacatatgaaacatgaagagctcgtcctaagtgaagaagaggcggtaacaggctccactccggcttttcatcatctctctttaagactgattttcggtgaaacccccatgttttattttatgaataaatatatctaattcgtttgtaaaatcgaacaataactcctccgaaagtattctatacacatttgttataatcatgctaggatgttagataaagggataatttgtaggatattgtatttctgttcaatatgatcggaggaatctcatgaacaatcttgcctttttatttcctggacaagggtctcagtttgtaggaatgggcaaacaattttggaatgattttgtgctcgcaaagagattgtttgaagaagcgagcgatgcgatctccttggatgtaaaaaaactgtgttttaacggagatatgaatgaattgacaaagacaatgaacgcgcagcccgctattttaacggtcagtgttattgcttttcaagtgtatatgcaggaaataggggtgaagccccgcttcctggcaggtcatagcttaggcgaatattcagcgcttgtctgtgccggcaccctttcttttcaggatgccgttacacttgtaaggcagcggggaattcttatgcaaaatgcggatcccaagcagcaggggacgatggccgccgtgactcacctctctctccaaacgttgcaggaaatatgttcgaaagtatcgacggaagactttccggcaggagtagcctgcatgaattcagaacagcagcatgtaatttccggacaccggcaagctgtggaacgtgtcatcaagatggcggaggaaaagggtgcggcatacacttatttgaatgtcagtgcgccttttcacagttcgatgatacgatcagcctccgaacaattccagactgtattacaccggtattccttccgggatgccgcatggccgatcatttcaaatgtcaccgcgcgcccttacagcagcggaaaatcgatcagcgaacacctcaagcagcacatgacgatgccggtaagatggacagaatcgatgcattacttgcttttacacggagtcacagaagtcatcgaaatgggtccgaacaatgttttagccggtctgctgagaaaaacaacgaatcacattgtaccttatcccttaggacagacatctgatgttcacttgctttccaattcagcggaaagaaagaaacatattgtccgtttacgcaaaaaacaactgaataaattgatgattcaatccgtcattgcgcgaaattacaacaaggattcagcggcttattccaatatgacgacgccattatttacgcaaatccaagagctgaaagagagaatggaaagacatgaaaatgagctctcagaacaagagctcgaacattcgatccatttatgcaaattaatttgcgaggctaaacagcttccggattgggaagaattgcggattttaaaataaaacgcccaggaggggacctatgtataccagtcaattccaaaccttagtagatgtcattcgggaaagaagcaatatctctgatcgcgggatccgttttatcgaatccgataaaaacgagacggttgtctcttatcgccaattgtttgaagaggcgcaagggtatcttggctatttacagcatctcggcattaagccgaagcaggaaattgtatttcaaatccaagaaaacaaatcatttgtcgttgctttttgggcttgtatattaggaggaatgatcccggtgccggtcagtatcggagaagatgatgaccataagctgaaggtctggcgcatttggaatatattaaatcatccgtttctgattgcctctgaaaaagtattggacaaaataaagaaatacgctgcagaacacgatttacaggatttccatcatcaattaaacgaaaaatctaacgtcattcaagatcaaacctacgattaccccgcttcattttatgaacctgatgcggatgaactcgcctttatccaattttcttcaggatcgacaggagatccaaaaggagtcatgttaacgcatcacaacttaatacataacacgtgtgccattgggactgccctacacgttcattcgaaagactctttcttatcatggatgcccttaacgcatgatatggggctcatcgcctgccaccttgttcccttcataaccggaatcaatcaaaatctgatgcctacagagttatttattcgcagacctattctttggatgaaaaaagctcatgaacataaagccagtattctatcctctcctaatttcggatacaactacttccttaaatttctgaaaaacgaaccagactgggatttatcccacatcaaggtcatcgcaaacggtgcagaaccgatattgccggagctctgtgacgaatttttgaaaagatgcgcagcattcaatctgaaaagatccgccattttgaatgtttacggtttagcggaagcgtcggtcggcgcagcattctctaaattaggtgaagaattcgttcccgtttatttgcatcgtgactatttaaatcttggtgaaagagctgtaaaagtcagcaaagaagaccaaaattgcgcttcattcgtcgaggtgggacaacctattgactattgtcagcttcggatctccgatgaaacaaatgaaagagtagaagacggaatcatcggccatatccagatcaaaggagacaatgtaacgcaagggtattataacaacccagagagtacggaaaaagcgctgacttctgacggctgggtaaaaacgggagacctcggattcattagtgaaagtggtaacttagtcgtaaccggaagagaaaaggacattattttcgtgaacggaaaaaatatctacccgcacgatattgaacgggtcgcgattgaaatggaagaggttgacttaggaagggttgccgcctgcggtgtatatgatcaaaagacgcaaagcggagaaattgtgctctttgttgtttacaaaaaatcacctgaaaaattcgcaccgcttgtcaaagagataaaaaagcatttgtacaagcggggcggctggagcataaaagaagtccttccgatccgaaaactccctaaaacaaccagcggaaaggttaaacgctacgaacttgccagacagtatgaggcagggaatttttcaacagagtctgccgccatcaatgaatgtttggagagcagtccggaaacatccggacagacacccattcatgagatagaaacggaattgctgtctatcttttccgatgtgctcaacgggaaaaaggttcacctcgctgacagttattttgatatgggagcaaattcattacagttatcgcagattgccgagcgcatagaacagaaattcggacgcgagcttgccgtttcagatctctttacgtatccttctatcactgatttagcggcatatctgtctgaaagccgggctgaaatcaagcaggacgcggcagcgaaaccaagccatgtgacaccgaaagatatcgccattatcgggatgtcgctcaatgtcccgggagcgtcaacgaaaagtgatttttggaatctgcttgaaaaaggtgagcacagcattcgagaataccccgaatcccggctgaaagatgcggcggattatttaaaatccatccaaagcgagttcaatgagagtcagtttgtgaagggcggctatttagatgaaatcgaccgctttgattattcgttcttcggtttagcccctaaagcggctcagtttatggaccctaaccaaagactgtttttgcagtctgcatggcatgcgattgaagatgcgggctatgccggcggcagcatgaacgggagccgtgtcggggtatatgcggggtactcgaaggtgggctacgattatgaacgtctcctttctgcgaattatccggaggaacttcatcaatatatcgtgggcaatctcccttccgtgctagccagccgaatcgcttatttcttaaatttaaaagggccggcggtcacagtggatacggcatgctcctcatcgcttgccgccgttcatatggcatgcaaatctttaatatccggcgattgtgaaatggcccttgccggaggtatccgaacatcgctcttgccgatctgtatcggacttgatatggaatcttcggacgggtacacgaaaacgttcagcaaagattcagacggcacgggcacaggtgaaggcgcggccgcagtcctgctgaaacctctgcaggatgctgttcgcgacggagaccatatttacggcgtaatcaagggaagcgcgctgaatcaagacggaacaaccgccgggattacagcaccgaatccggcagctcagactgaggtcattgagacggcctggaaagacgcgggcattgcccctgaaacactgtctttcatcgaagcgcatggcaccggaacgaagctcggcgatccggttgaatttaacgggctttgtaaagcgtttgaaaagtatacggcaaaaaaacaattttgtgcgattggttctgttaaatcaaacatcggtcatttgtttgaagcggcaggcatcgtcgggctgatcaaatctgtcctcatgctgaatcacaagaaaaatccgccgttagcgcactttaatgaacctaatccgctcattcattttcactcttcaccattttacgtaaaccaggaagctgcagcgttcacatccggtgatgagccgctgcgaggcggagtcagctcatttggttttagcggaacgaacgctcatgtggtattggaagaatatatttctcaaagtgagtatgcacccgaggatgaacatgggccgcacctgtttgttttatccgctcatactgaaaaatcactctatgaactcgcacagcagtaccggcaatatgtatcgggtgacagccaagcttcattaaagtccatttgctatacagccagtacgggcagggctcatttggatcatggcattgccatgattgtatccggtaagcaagaattatcggataagctgacccgcctgattcagggagacagaaaccttcccggtgtatacatcggttacaagaatatgaaggaaatgctgcctgctcataaagaagagctgaatcaacaagcagccgctctgattaagcagcgtttacgtacgcaagatgaacggatcacatggctgcatcgcgcagccgaattatttgtgcaaggagccgttatcgattggcgcgcgctttattccggtgaaactgtacaaaagacgccattgcccctgtatccgtttgaacggatccgatgctgggctgaagctgaccaattgcgcttaaacgagggcgaaaagaaaggaggagcagcattgaatatcaatcaatcgaaagcgcacattgaatccttcctgaaaactgtaatcagcaacgcttcagggatcagagcggaggaactcgatctgaatgctcattttatcgggctcggaatggattctatcatgctgtcacaggtcaaaaaagccattgcggacgaatttggggtagacatcccgatggatcgtttttttgatacgatgaacaaccttcaaagtgtcatagattacttggctgagaccgttccatcgtcctttgcatccgctccgcctcaagagaatgttccggcgcaggaaatacaggtcatttcagaagcacagcctgaatcggatcgcagagaaggtcatcaagagcatatgctcgaaaaaataatcgcttctcagaatcaattaattcaggataccttgcaagctcaattaaatagctttaatttgttgagaaatagcggacatcattccgatgagaaagaatatgctaaagcgcgagagaaatcaattccttctgtcaagcaggggcctccgaccgtcactgcagaacagaaagcggctcaagaagcgaaaccctatgttcctttccagcctcagaacctgaatgatcagggacactataccgcacggcaaaaacaatacttagaagacttcatcaagaaatacgcagataaaacgaaaggttccaaacaatatacggacaacacccgatttgctcatgcaaacaaccgcaatttgtccagcttccgttcgtattggaaggaaatcgtatacccgattatcgccgaacgttctgatggttctaaaatgtgggatattgacggaaatgaatatatcgatatcacaatgggattcggggttaaccttttcgggcatcatccttcctttattacacaggttatcgatgattcaacccgttcatcattgcctccgctcggcccgatgtcagatgtcgccggtgaagttgccgaccggatccgcacatgtaccggagtggaaagggtcgctttctataattccggaacagaggccgtcatggttgccctgcgtttggcgcgggcggcaacaggaagaaagaaagttgtggcgttctcgggatcttatcacggcacgtttgacggcgtattaggggtagccggcacaaaaggcggggctgcgtctgcgaatccgctggctccgggcataccgcagagctttatggatgatttgattattttacattacaacaatcccgattcgctggacgtgatccgcagtcttggtgatgaattggcagccgtactggtggagccggtacaaagccgcagaccggatttgcagccgcaggcatttttgaaagaattgcgggcgatcacgcagcaatccggaacagctctgattatggatgaaattattaccggatttcggatcggtctcggcggcgcacaggaatggttcggcattcaggctgatttagtgacctacggaaaaatcatcggcggcggacagccgttaggggtagttgccggaaaagctgagttcatgaatgcgatcgacgggggtacctggcagtatggggacgattcctacccgcaagacgaggcgaaacgcacgtttgtggccggcaccttcaatactcacccgcttaccattaggatgtcattagccgtccttcgccatttacaaaccgaaggagaacatctgtatgagcagcttaatcaaaaaacagcctacctggtcgatgagctgaatcgctgcttcgaacaagcgcaagtgcctatccgcatggttcgattcggttctttattccggtttgtctcatcgcttgataatgacttgttcttttaccatctcaactataaaggggtctatgtatgggagggacgcaactgcttcttgtcttcggcgcataccgcggatgatatcgaaaatattattcaagcggtgaaagacacggtggaggatcttcgccgaggcggatttattccggaaggcccggattcccctgatggcggaggccgtaaaaagtccgggacgcgcgagctttcacctgaacaaaagcagttggttatggcatcccattacgggaatgaagcttccgccgctttaaaccagtccattatgctgaaagtgaagggcgaactgcagcatacaccattaaaacaagccgtccggcatatcgttgaccgtcatgaagctttacgtacggtgattcatcccgatgacgaggtacagcaagtgcaggaacggatgaatatagatatacctgtcattgattttaccggtctcccgcatgaacatcgggagccggaaatccaaaaatggctgacagaagatgccaagcggccgtttcatttccatgaacaaaagcctttgtttaggatccatgtgcttacatcggctcacaatgaacatctgattgtgctcacgttccatcacatcattgccgatggatggtcaatcgccgtttttgttcaagaactggagagcaactacgcggcaatcgtacaaggaaaaccgatttcaccgaaagaggcagatgtttcgtttcgccaatacttagactggcagcaggcacagattgacagcggccagtatgaagaaggggtccgttattggcggcgtcatttctctgaaccgatacagcagccaattctgccgagcacagcttctgtccgttatccgaacgggtatgagggagaccggtgtaccgtcaggcttggacggccattgagcgaggctttaaggtcattaagcattcagatgaaaaatagcgtatttgtgacgatgctgggtgcatttcatctttttctgcaccggcttaccaaacagtcaggccttgtgatcggggtccccgcagcaggtcaatcgcatatgaaacagcatgatctgattggaaattgcgtcaatatgattccggtgaagaacacgtcttcttcagaaagcactttatccggttatcttggcagtatgaaagaaagcgtgaatcttgcaatgcggcaccaagccgtcccgatgacactggtggccagagagcttccgcacgatcaagtgccggatatgcgtattatctttaatttagacaggccttttcgaaagctgcatttcggaaaggcggaggcggagcccgttgcatacccggtaaaatgcaccctgtacgatttatttcttaacataactgacgcgcatcaagaatatgttcttgatttcgactttaatacgaacgtcatcagtccggaaatcatgaaaaagtggggagcgggttttacaaaattgctgcaaaaaatggttgagggagattcaatccctcttaacgccatgataatgttttccgatgaagaacagcatgctttacaagcactttacgccgaacaccagaagcggatctcttcaataggaagcaatacggcaaattttactgaagcctacgaggcgccggtaaatgaaacggagcggcagctggcgcggatttgggaggaacttttcggccttgaacgggttggcagatcagatcgctttctggctttgggaggaaactcactccaggcgacgcttatgctttccaaagttcagaagacatttcaacaaaaggtttccatcggacaatttttcaatcaccagactgttaaggaattagcacatttcattcagaacgaaacgaaagtcgtacacctcccaatgaaggctgccgagaaaaaagcgtattacccgacatcgccggcacagcaaagagtatatttcctgcaccaactggaaccggatcagctggcgcaaaatatgttcggccacatatcaataacagggaagtacgatgagcaagccctgatctcatctcttcaacaagtgatgcatcggcacgaagcgtttcgcacgtatttcgacattatagatggcgatatcgttcagaaacttgaaaacgaagttgattttaacgttcatgtccggacaatgagccgggacgaatttgatgcctattcagaccggtttgtaaaaccgttccgcctggatcaagctccgttagttcgtgcggagctgatcaagattgaaaacgagcaggccgaactgcttatcgatatgcatcatatcatttcggacggttattccgtcaacatccttacaaatgaattgctggctttatatcatcagaaaccattaccggacattgaatttgaatataaagatttcgcagaatggcaaaaccaacggctgaatgacgatgccatgaagcggcaggagacatattggctggaacaatttcaagacgaaattcctatccttgaccttccgacagacggttccaaagcggcagaacggtcttctgagggacagcgtgtgacatgctccttacagccggatgtcatccgttcgcttcaagacttggcgcaaaaggcggaaacgactctctatacagtgcttctggccgcctataatgtgctgcttcataaatatacgggacaagaagacattgtcgtaggcacgcctgcttcaggaagaaatcatccggatatcgaaaaaatcatcggtattttcatacaaaccatcggaatccggacgaagccgcacgccaatagaacgtttacggattatctggaagaagtaaagcggcagacgcttgacgctttcgaaaaccaagactatccattcgaccggcttgtggagaaattaaatgtgcagcgggaaacaaccggaaagtctctgtttaacacgatgtttgtgtttcaaaacattgaatttcatgaaatccggcacaatgaatgtacatttaaagtgaaagaacgaaatccaggggtctctttatatgatttgatgctcacgatcgaagatgccggtcaacagatagagatgcattttgattataaaccgggacgattcacaaaagacaccattgaacagatcaccagacactataccgccattttaaaccgccttgttgagcagccggagatgacattgtcttccgttcctatgctgtctgaaaccgaacggcatcaactgctgacggagtgtaatggcacaaagacgccgtatccgcataaggaaacggtatatcggtggtttgaaatgcaggcggaacagagtcccgatcatgaagccgttatttttggcaatgagcggtatacgtacagacagctcaatgaacgggcgaaccgattggcgcggacgttacggacaaaaggcgtacaagcggatcaattcgttgccatcatctgcccgcatcggatcgagctgattgtcggaattttggctgttctgaaagccggcggcgcatacgtgcccattgatcctgaatatccggaagatcggatccaatatatgctgagagattcaagagcggaggttgtgttgacacagcgcagcctgctggatcaattaccgtatgatggtgacgttgtgcttttggatgaggaaaactcataccatgaggagcactcgaatcttgaatcggacagcgatgtgcatgatttggcctatatgatctatacgtcaggttcgacgggaaacccaaaaggtgtactcattgagcatcagggactggctgattatatttggtgggcgaaagaggtttatgtaagaggtgagaaaaccaacttcccattatactcttccatctctttcgatctgactgtgacctcgatatttacaccgctggttacgggaaataccatcattgtctttgacggcgaagataaaagcgctgtgctttctgagattatgcgggactcaagaatagacatgatcaaattgaccccggcacatctgcacgtcatcaaggagatgaatatcgctggcggcaccgcaatacggaaaatgattgtcggcggagaaaatttaagcacccgtctggtcaaaagtgtcagcgagcagtttaaaggccggctggacattttcaatgaatacggaccgacggaagctgtcgtcggatgtatgatttatcacttcgacgcagaacgggacaagcgggaatttgtaccgatcggcactccggctgccaacacggatatttatgtggccgatgcaagcagaaacctggttcccatcggggtaatcggcgaaatatatatcagcggaccgggtgttgccagagggtattggaaccgcccggatttaacggcagagaaatttgttgaaaacccgtatgtcccgggagcaaagatgtacaaatcaggggatttggctaagcggttgaaggacggaaatcttgtatatatcgggcgcgttgatgaacaagtcaaaatcaggggataccgaatcgagcttggtgaaattgaagcagcgatgcataacgcggaagcggtgcaaaaagccgcggttacagtgaaagaagaaaaagacggcttaaaacaattatgcgcgtattacgtaagcgacaagcctatagcggctgcgcagcttagggaacaattgtcatcgaagcttccggactacatggttccgtcctattttgtccatctggagcatatgccgttaacgtccaacgggaaaataaaccgtaaggcactgcctgcaccggaatcgagtctgcagcagacagctgaatatgttccgccgggtaatgagacggagtccaaactgacagatttatggaaggaagtgctcggaataagccatgcggggatcaaacataatttctttgatctcggaggcaactccatccgagcggctgccctagccgccagaattcacaaagagctggatgtgaatctgtctctcaaagacatattcaagtttcctaccattgaacaattggctgacaaggcgttacacatggacaaaaatcgatatgtaccgattccggctgcaaaggaaatgccatattatccggtttcttcagctcagaggcggatgtatttattaagtcacacagaaggcggcgagctgacttacaatatgacgggtgccatgaatgtggaagggacgatcgatcccgaacggttaaacgccgctttccgaaaattaatcgcgcgtcatgaagcgttgcggaccagctttgatttatatgaaggcgagccggcacagcgtattcatcagtacgtcgactttacgatagaacggattcaagcaagcgaagaagaagcggaagaccgtgtgcttgatttcatcaaagcgtttgacttagccaaaccgccgctgatgcgggccggactgattgaaattgaacctgcgcggcacgtgcttgtggttgatatgcatcatatcatttctgacggcgtgtccgtcaatattctgatgaaagatttaagccgaatctacgaggggaacgaaccgggcccgctctctattcaatataaagactttgcagtttggcagcaatcggaccttcagaaacggaacatcaagagccaggaagcgtattggctggatcagtttcacggtgatattcctgtactggatatgcctgcggattatgagcgacctgccatacgcgattacgaaggcgaatcatttgaatttcttatacccgaacacttgaaacagcgtttaagccaaatggaagaagacacaggagcaacactgtatatgattttattggcagcctatacgattcttttatccaaatacagcggacaagaagatattatcgtaggaacgccatctgccgggcggactcatttggatgtagagccagtcgtgggaatgttcgtcaatacgttagtcattcgcaatcacccggcgggccgtaaaacatttgatgcctacttaaacgaagtaaaagaaaacatgctgaacgcctataaaaatcaagactatccgttggaagaattaattcagcatctgcatcttccaaaagattcaagccgcaatcctttattcgatacgatgtttgtgctgcaaaatctcgatcatgctgaattgactttcgattcccttcaactcaagccgtatccatttcatcatccggttgccaaattcgatttgaccttgtcgattcaggcggaccgcgacaactatcacggactgtttgaatattcgaaaaaactgtttaagaaaagcagaatcgaggttttatcaaacgactacttacacatcctatcggcgattttggaacagccaagcattctaatcgaacatatcggattgagcggcagcaatgaggaagaagagaacgcgcttgattctattcaattgaacttttagggaaaagcattatttctttaaaatatataaaatgaggtgctccaatgtcggtatttaaaactcaagaaacgtactgggaaaacctgtttgatgaagaagacggcctaagcgcattcccttactttaaagcagcggataaagcgtcgttggcccgtaccggctaccaggaaaaatgcatctgccgttccttatctccggaagtatctcaaagaatcatgacaatggcgaatcattccgatatggcggcctatctgattttattggcgggtattgaatgcttgttgtataaatatacggatcgaacgagcctgattcttggcattccaacggtatcgaagcaaaaagccggccagtcagccgttaacaacattgtcctcttaaaaaatacgctttcaaacgagagcacatttaaaaccgtattcgggcagctgaaagaagccgttaatgattctctgaaaaatcaaaacctgccgtttagaaaaatggcccggcatctgagcgtgcaatacaatgacgagcatatgcctttgattcataccgtcgtttcgcttaacgaaattcattccttgcaatgtaaagaagatactgcaaccgatacgctgtttcactttaatttggagaacaacgggattcatttgaagcttttttataacggcaatctgtacgatgagcgctatatcaatcaaattgtatcccatttggatcagctgctgtctatgatcctgtttcagcctcaagccgcgatccatacggcagagatcttaccggaagcggaaaaacagaagctattgtttgattttaacgacaccgtcagagatttctccgggagcagaacagtctatcaattatttgaagagcaggcagaaagaacgcctgagcatgcggccgtcaagtttaaaaacgaccatttgacgtacagggaactgaatgagaaggcgagccgtttggcaagaacattgcgtaattgcggggttcaacccgatacgttagtcgccattctcgctgatcgttcattagagatgatcgtatccattatagctgtttggaaggcagggggcgcttatgtgcccctggatcctgaatatccaaaagagcggcttcaatatttgcttcatgatgcggatgcagacgttctccttgttcagcatcatttaaaaaacagcctcgcctttgacggcccggtgattgatttgaatgatgaaacatcataccatgccgattgctcattgttatcaccagtagcggaacacagccatttagcctatgtcatttatacgtcgggtacaacaggaaagccgaaaggggtcatggttgaacacggcggcattgtgaactcgcttcagtggaagaagtcgtttttcaagcattctccggcggatcgcgtgcttgtcttgtacccgtatgtttttgatgcgttcattttaaatttctttggcccgcttatctcgggggcaactttgcaccttttgcctaataaagagaataaagaaactttcgccattcaaaatgccataaaacaagaaagaattacccatttctcaacttccccccgtcttctgaaaacgatgatcgaacagatgaacagagaggacttcatccatgttcagcatgttgttgtaggcggtgagcagctggaaacagatacagttgagaagctgcattctctgcagcctcgcattcggatcaataatgaatacggaccgacagaaaacagcgtggtatctacatttcaccctgttcagtccgctgatgaacagatcacaatcggcagcccggtggccaaccatcaagcttatattttaggagcgcaccatcaaatccagccgatcggcgtaccgggagagctgtatgtcggaggagcgggagtggcccgcggctacctcaatcggcctgaattgacggaggaaaaatttgtggagcatctgcatgtccctggtcaaaagatgtataagacaggggatctcgccagatggctgccggatggaagaatcgaatatttagggcggattgatcatcaagtgaaaattcgcggctaccggattgagatcggcgaggtagaggcagccatgttcaatctggaaaacgttcgtgaagccgcagtcgtcgcgcgggaagacgcagacggggccaaacaattgtatgcctattatgtcggcgagccttctttgaccgctgcgcagttcagagaagaattatcccgggaactgcctaattatatgattccctcccgctttatcccattggaacgcattccgctcacttccaatgggaagattgatctgaaagctttgcctgctgctgacgaaaatacgcgggcggaaaacgaatacatagccccgcggaacacaatagaagaactgctggcgtctatctggcaagaagtattaggggcagaacgtataggaattttggataatttctttgattttggcggagattcgattaaatcaattcaggtgtcatccagattgtatcaagccggatacaaggttgatatgaagcatttgtttaaacacccctcgattgctgaactcagtcagtttgtagcaccggtcagcagggtggctgatcaaggagaagtgaatggcggaaccaagctgaccccgatacagcattggttttttgagcaaaaaatgccgcatgcacaccattacaatcaggccgtcatgttatattcggcggaaggctttaaagtggctccgcttcgccggacgatggaacggatcgcgtcacatcacgatgccttgaggatgatttttgaaaaaacgccggatggatacgctccgcgaattacaggaacagatgaaagtgaactataccatctggaagtgatgaattataaaggggaaaccgatccagctcaagcgattgccgataaagcgaatgagattcaaagcagcatggtattagacaaagggccattgatgaagctcggtttgttccaatgtccggacggagatcatttgctgattgcaattcatcatttgctgattgacggagtatcctggcgtattttactcgaagattttgcaagcggatatgagcaggcagaacgcggacaaacgatccagctcccgcaaaaaacagactcgtttccatcctgggccgatcaattgtccaaatatgcggcggaaaccgatatggaagaggagattgcgtattggaccgagctttcaagtataaagcctcagccattgcctaaggacactatcagcgaagggtcgttattaagagacagcgaagaagtgacgattcaatggacaaaagaggaaacggagcaattattaaaacaagcgaaccgcgcctacaacacggatatcaacgatctgctgctgacttcgttagggctggctgttcacaagtggacaggcacggaagacattgtcgtgaatttggaaggccacgggagagaaccgattattccggatgctgacatttcccgcacgataggatggttcacaagccagtaccctgtcgtcctgaggatggaagccggaaaaaacctgtcgcagcggatcaagatcgtaaaagaagggctgcgccgtatccctgacaaaggaatgaattacagcatcatcaaatatatatccgggcactcggaagccgacagcctgcagctgaatccggagatatcgtttaattatttggggcaatttgaccaagacctgaagcatcaggctttgcgcatctcgcctttttccacagggttatcaatgaacgaaaaccaagagagaacggccgtgcttgatttgaacggcatgattgccgaagggacattatcactgacactgagctacagcagcaaacaatacgaaagatctactatggctcaatttgcccgggggttgaaagaaagtctgcaagaagtcattgcacattgcgtaagccggcagcagacttctctcacaccaagtgacatcctgttaaaagacatctcaatcgacgaactggaacagcttttggagcagacgcgtgaattaggcgaagcggaaaatatttatccattaacgccgatgcagaaaggcatgctgtttcacagcttatttgatccgaattcaggtgcttattttcagcaaacgatgtttgatctgcatggagatctggaaattgattcattttcaaaaagcttggacggcttatcgcaaaaatatgatattttccgcacgaatttttacagaggctggaaggatcagccgctccaaatcatattcaaaacgaaaaaaatcggttttcaattcaatgacttacgagagatgaaggaatcacaaaaagaagcgatgattcagcagtatgccagagaagataagatgcgggggttcgacttagaaaaaggcgcgttaatgcggttatttatccttcgtacggatgaaaagacataccgttttatctggagtttccaccatattttgatggacggctggtgtctgccgctgattacaaaagaaattttcgagaattactttgctttgcttcagcaaaagcagcctgaacaatcgtcaattactccgtacagtcaatatattgaatggctcggccggcaagatgcgaaagaggccgcggcttattgggataagtacttggaaggatatgaggagcaaaccggccttcctaaggatcaccatgcaacggaagacggacgatacgttcctgaaaaagtgacgtgtgacataagctccgatctcacttcgaaaatgaagcggacggccggcaagcatcatgtcacgctgaacacgctgctgcagacggcatgggcggttttgctgcagaaatataaccgcagccgggacgttgtgtttggaagtgttgtatccggaagacctgctggaattccaaacgtggaaaccatgatcggcttattcattaacaccattcccgtccggttccgatgtgaagccgggacaacgtttgccgggcttatgaaagaggcgcaggaaagggctgtagcgtctcaacaatttgagacgcacccgctgtacgatattcaagcgcgtacaacgcaaaagcaagatttaattacacatttaatgatattcgaaaattatccggttgatcagtatatggaaagtataggccgccaaaacggaacatccatcacgatttccaacgtacaaatggaagaacagaccaactacgattttaatttgactgttattcccggcgacgagatgaacatctcttttgaatacaacgcaaatgtgtatgagcgggcaagcatagagcgggttcgggaacatttcatgcatatcctgcatcaagtcgtgacagatgcggatattcgggtggatcaagttgaattgttaacggaaggcgaaagaagaacccttctgcagacgcttaacgacacggccgcgccgtttccgcagacgccggttcatcaattatttgaagagcaatcgcagcgtacgcctgatcaagcagccgtcattgataaggacaggcagctcacgtacggagagctcaataagcgggccaaccgactggcgcgaacgttaagagcgaaaggagtgcaggcggatcagcctgtagccatcatcacaagaaacagcatcgaatcggtggtcggaatccttgccgttttaaaatcaggcggagcctatgtccctatagatccggaatatccgcaagaccgcatccggtatatgctggatgactcccaagccggaatcgttttaatgcagcgggacgtcaggaaacagcttgcctatgaaggcgccacggttttacttgatgatgaaagttcttatcaccaagatggctctgaccttgctccgataaatgatgtgagccatttggcatatgtcatttatacgtcaggttccacagggcggccaaaaggcgtactaatcgagcacggaggcttgaccaattatatttggtgggcgaaagaagtttatgtaaaaggcgagaaagccaacttcccattgtattcgtcaatttcttttgatctgacggtgacttctattttcacgccacttgtcacaggcaatgcaatcatcgtctatgacggagaggataaaacagctctgcttgaatcgattgtgcgggacccgagggtggatatcattaaattgaccccggcccatttgcaggttttgaaagaaatgaacattgccgatcaaacggctgtccgaagaatgattgtgggcggggaaaacttaagcacccggttagcccgcagcattcatgaacagttcgaaggccggattgaaatatgcaatgagtacggaccgacggaaaccgttgtcggctgcatgatttaccgttatgatcccgcaaaggacagacgggaatcggtaccgatcggaaccgctgcggcaaacacgagcatttacgttcttgatgagaatatgaaacccgcaccgatcggagtgccgggagagatctatatcagcggcgccggtgtggcaagaggatatttgaaccgtcccgaattaacggcggagaaatttgtcgatgacccgtttgaacccggagcgaagatgtataagaccggagatttggcgaagtggctggcggacggaaacattgaatatgcgggcagaatagatgaacaagtgaaaatcagaggctatcgtatcgaattaggcgagatcgaggcggcactgcttcaagaagaagcgatcaaggaagctgtcgttacagccagagaggatgtccacgggtttaaacaattgtgtgcatattacgtgagcggcgggcaaacaacggcagcccggctccggaaacaattgtctcaaacccttgcaagttatatggttccggcttattttattgagcttgatgaaatgcctttaacttctaacggaaaaataaacagaaaagggctgccggctccggatttcgagctgcaggacagagcagagtataaagctccccgaacaaaagctgaagaaatattagtttctgcctgggaatcggtattaggcgctgaaaacgtcagtattcttgataatttctttgaccttggcggagattccattaaatccattcaagtatcctccagattaaatcagcaaggatacaaaatggaaatcaaagacttgtttcaatatgcaacaattgctgaattgagtccgcatatcaagcagaatctgcgtatagccgatcaaggtgaggtcaaaggaaaagtcagcctgactcctattcagcattggttttttgaacaaataacaacagatcagcattattacaatcaagccgtcatgctgcatgcgccggaaggttttcaggaaacgcagcttcatcaaaccctgcaaaagcttgctgaacatcacgatgcgctccgcatgacattccggactacggaaaatggctgtgaggcacagaatgaagaaatcgcccaaagcggactgtaccgcttagaagtcctgaatctgaaagaagatcccgatccgggacgtacaattgaagccaaagctgatgagatacaaagcagtatgcatttaagtgatgggccgttaatgaaagctggtttgtttcaatgcgcaaatggagatcatctgctcattgccatccatcatttgattatagacgggatttcatggcgcattttactggaagatatcgttagcggctacaaacaagccgagaacgggcgagtgattcaactgccgcaaaaaacagactctttccaattatgggctaagagactctcagaatatgcgcaaagtgaaagcataaaacaagaacaggaatattggacaaaaatcgaacaaaccgaagtcaaaccgctgcctaaagattttcatgaaacccatacaactgcaaaagacagcaaaacagcaactgtggaatggacgaaagaggaaacggagcttttattaaaacaagcgaatcgcgcttatcacacggaaataaacgatttgcttttaacttctctgggtctttccatatcgcattggtcaggactggaacaaattccgattcatttagagggacacggccgagaacagattatacaggatatagatatctcccgcacggtcgggtggtttacaagtctgtatccggttgtgctgcacgcgcagccgggcaaagaaatctctgattatatcaagacgaccaaagaaggattgcgccaaattccgtataaagggatcggatatggaatagcaaggtacttaagcggcggaatgccatcgaaactcaatcctgagatcagctttaactacctgggacagtttgaccaagatttacagcagcatggggttcagttatcttcttattcttgcggttcagactcaagcggacatcaagaaagaccgtatgtattgaatataaacggaatgatcaccgagggccggctgaagcttacgatcagctacagcagcaaacagtacgcaaaagaaacgatcatgcggttatcggaaacgattcaaagccgcctgcggaccatcattacgcattgcgttcataaagaacaatcggaactgacgccaagcgatattttgttaaaaggcatgtccattggcgaattggatcagctcctcattcaactgccgcatgcaggtgaggttgaaaacgtgtatccgctcactccgatgcagaaaggaatgctctttcacagcctgctggacgaggcctcaagttcttattttgaacaagcatcgttcgatttgcagggagagttaaagattgattggtttaaagcaagccttgaacgattatttgaaacatacgccgtgctcagaacccgtttttacagcggctggaacgatactcctttacaaattgtctataaaacgcaaacaccgcaaattcattttgcagatttgcgtgatagagaggagcacctgagagaggatgcaatcgcagcctatcaaagagaagacaaggcaaaaggatttgacttggctcgggatccgctgatgcgcatagcgattttccgtatggaagaccgcaaatatcatttgatttggagcttccatcatattgtgatggatggctggtgcctgtctcttatcacgaaggaagtgtttgatcattatagcgccttacaggaaggaagggaaccagaaccgccatcggcagctccttacagcgactatatcgagtggcttgaccgccaagatcagggagcggcaaagcggtactggagcgggtatcttgaaggatataaaggtgaaaccacgcttcttcataaaatagcgcagcatgaacaaaaagaatacgcctatgccaatgtgatctgccgatttgatcacgaacagacaaaacaattacagcagatcgcaaatcagcatcaggttacgttaaatacgttgatccaaacgttatggggagtattattacagaaatacagcggatccgcagacgttgtcttcggcagtgtcgtgtcgggaaggccggcggaaattcctgatgtggaacagatgatcggcctgttcatcaatacgattccggtccgcatccgctgcgatgaggacagcacttttgctgatacgatgcaaatggttcaacaaaacgcgctggcttcccaatcgtacgatacctatcctttatacgaaatacaggcccaaacggaacaaaagcaaaacttaattgatcatatcatgatctttgaaaattatccgatagggcagcaagttgaagagacgggacattatggtacggagctgaacattacgaattttcatatgcaggaacactcccactatgatttgaatgtggttgtcatacctggcaaacagctggccgttcatttcggttttaatgaaaacgaatatgaaaaatcagaagtggagcggctccgaggtcattttgaaaaactcatgcagcaagtattgcggcagccgtctgtcaaaatagaagatttggagcttctctctcagcaagaaaaagaatatctgctcagccgctttcagtctaatgacatgcattacccgcgtgaaaaaacgattcatgagttgttcgaggaacaggcgcatcgtactccggacaatacagcggttgtattcgagggtaaacaattcacctacgaagaactgaaccggcgtgccaatcagcttgctcaaaccttgcaggcaaaaggagtgcaggcggatcagcttgtcggcattatgactgaacgctcgcttgagatggttgtaggcatcttgggagttttaaaagcgggcggtgcatatttgccgatagatcctgattctccgtctgaacgcatccgttatattttaaatgattcaagcatcagcgtattgctttactgcgggaagctgcaggatgacatcggcttctcaggaacatgtatcgatctcatggaggaacatttctatcacgaaaaagacagcagtcttgcattctcttatcagtccagtcaactggcctatgccatttatacttccggcacgacaggcaagcctaaaggcacgttaattgaacatcgccaggtcatccacctgatagaagggctgagccgccaagtatactctgcctatgatgcggagctgaatatagccatgctcgctccatattatttcgatgcttctgttcagcaaatgtatgcttccttgctgtcaggccataccttgtttattgttccgaaagagatagtgtcagacggtgctgccttatgccgttactatcggcagcattcgattgacatcactgacggaacacctgcccacttaaagcttttgatagctgcaggtgatttgcagggagtcacgcttcagcatcttttaatcggaggagaggctctttccaaaacgacggtaaataagctcaagcaattattcggcgagcatggcgctgcgcctgggattactaatgtatatgggcctacggagacttgcgtagacgcgtctctgttcaacattgaatgttcttccgatgcttgggcacgcagccaaaactatgtccctataggcaagccgttaggcagaaaccgaatgtacattcttgattcaaaaaaacggctgcagccgaagggcgtccaaggcgagctgtatattgcaggggacggtgtcgggcggggttacttgaacctgccggaactgacggacgaaaaatttgttgccgatccgtttgtaccggaggaccgaatgtacagaaccggtgatctggcccgccttctgccggatggaaatattgaatatatcggccggattgatcatcaggtgaaaattcaaggttttcggattgaactcggtgaaatcgaatcggtgatgctgaacgttcctgatattcaagaagccgccgcagctgcccttaaagatgcagatgatgaatattacttgtgcggatactttgcagcagataagacaatacagatcagtgaacttcgcgaaagaatggcccggcatttacccggatatatgatcccggctcattttgtgcagctggataagatgccgctgacgccaaacgggaagttgaatcgccagttattgccggctccggtcaaaaagcgtgacagcggcatagagtacgtcccgccgcaaacttcggcagaaatccagctgacagcaatttgggaggatgtccttggactagagcaggtggggatcagagatcacttttttgagatcggcggacactccctgcgggcaacggcgctgattgcaaaaatacaaaagcaaatgcatgtccaaattcctttgcgggacgtcttccgtttcccaaccattgaacagctcgcacggacgatcacgaagacggagctgaccgggtatgccgcgattcctgcaattgaaaaaagaccttattatccggtatcctcagcacaaaaacggttgtacatcctgaatcacttggaaggcggagaactcagttacaacatgctgggactgatgactgtggaaggaaagcttgatcgtgacaagctgcagcaagccttccgcacgctgattttgcgccatgaatctttgcgcaccggttttaaaatggctgacggagaacctgttcagtatgtcttggatcacgcggcgtttgaagcagagtggtaccaaggggaagaagttgatgcggacctttatatccgccaatttattcgtccttttcacctggatgagccgccgctgcttcgcgtagggctgattgaacttcaatctgaccgcggaattctgatgtttgatatgcaccacattatttctgacggaacatccatgagcgtattgatcaaagaatttatccggatttatgaaggagagacattaccgcccctgcgcatccagtacaaggactacgcggtatggcagaccggcgaagcgagattacagcagattcaaaaacaagaagcctattggttagagctgtacagcggcgacgttcctgtccttcatctgccggccgattatatccggccgtcggcacgggattttgcgggagccacaatgcattttacgcttgataagcaaaaaagcgacggattaaagcagctggcatcccaaactgaatcgactttatatatggtgctccttgcgtcttatacattattgctttcaaaatacagcggccaggaagacattattgtcggcagtcctatagcgggaagaccgcacgccgatttggaaccgattatcggaatgtttgtcaatacattggcgatgagaaattaccctgaaaaagggaagacgttctctcagtatctgtccgaagtgaaggagaatgcattaaaagcttatgaacatcaggattatccgttcgaagcgctgatcgatcaactgaatatcgccagagacttgagccgcaatccattgtttgacaccatgtttgtgcttcaaaacacggagcaggaacagttagagataaatgacgtcactttcaaaccatatccaaacggacatacgatggcgaaatttgatctaactttaactgctgtggaagaaggggcgggtattcagttcacgatggaatacttgacggctctgtttaaaccggaaacgatcgaacggatgatggggcattttgaacagctggttgattcgattattaaacagcctgaggccgagctggctcgtttaaatatgatgaccaaggaagaggaaagagacattcagcaactctttaacgatactgcagttgcggaaaaacgaattccgacaacgattcatcagctttttgagcagcaggctgagcgtaacccggatcatgaagccgtcatgtttggaaatcagacgctgacttatcgtcagctgaatgaacgttccaatcagctggcgcgcgttcttcaagataagggtgcctgcactgatcaggttgttgccgttctcacggatcgctcagcacatatgatcatcggcattttagccatattaaaggccggcgcagcatttctccctatcgatccggagcttcccgaaaaacggcgggcttttatgctaaaagacagcggtgccgatgtgcttttgacttgtgcaggtcacgctattccgccgctctttgaaggagaagtgcttctgcttgatgatccgttactatatcaaggcagaacagacaatcttaacctttcctgctcggaaaatgatttaatgtatgttatttacacgtcaggcacaacagggcagccgaaaggcgttcagctggagcacaagacgatgacgaatctgctcgcttatgagcaggatcatacgcagcttcgctttgacagagtgctgcaatttgccgcaatgagctttgatgtctgctatcaagaaatgttctccgcgctttcaagcggaggaacactttttatcatcggcaatgaggcaaaacgtgacatacggcagctcaatgattttgtcagaacgcacgggatacaaacagcatttctcccgacagcgttccttaagctccttgcctcagagaaacactatttcgaaccgtttgccgagtgcgtggatcacatcatcgctgcgggagaacagctcatcgcaacaaggatgctgcgtgacatgctggcacgacaccaagtcacattgcataatcattacggtccgtcggagacgcatgttgtgaccatgtataccgtcgatcctgatacagatcaggagcttcagccgatcggaaaaccgatttcaaatacggagattttcattttgaatgaagccggaacgcttcagcctgtcggaatcgtcggtgaactttgtatttcaggagtgagcttggccagaggctatcataacagggagtctctgacgctcgaaacttttgttccgcacccatatgactcgaatcaacggatgtataaaacaggcgatctggctcgttaccttcccgagggaaacattgaatatgcgggaaggagggaccatcaagtcaaaatccgcggttatcgggttgaactcggtgaggtggaagccgctcttctcaagcacgtacaggaagcagttgtcctagcaaaagaaaataccgatggccaaagcgatttgtatgcctattttacagcagagcaatcactctcgatcagtcagctgaaagaaaaacttgctggccaaataccgggatatatgatcccttcatacttcatccagctggagaaactgccgctaaccggcaatggaaaagtaaatcgaagagcattaccgatgcctgaagcaggtttgcaaacggggagtgactacgttgctccgcggacgaatatggaagagcagctgatatgcatctggcaagacgttttgaaggtaaaagaaataggtgtaaaagataactttttcgatttgggcggccactcgttgcgagggatgacgctcatcgccaaaattcataagcaattcagcaaaaacatttcattaagagaagtctttcaatgtccgacagttgaagaaatggcacaggctattgcagaagctgaaaccaacggaccggactatattccgaaagccaaagcaaaagatgtctatcccgtatcgtccgtgcagaagatggtttacctgtcaacacaaatagaaggcggagaactgagctacaatatgccgggaattcttacattagaaggaaaactcgacatgaatcgcttgcaaaccgctttccaaagactgatccagcgccatgaatcgctgcgtaccggttttgaaatggtccgcggagaaccggtgcaggtgatcaaatcgcaagtggagttttcgatggaaagatacaaagcaacagccgacgaggttgaggaatgtttccgggccttcgtgcggccgttcgatctcagccaagctccattactcagggccggactcatcgagttagaacaagacctgcatattttcatgtttgatatgcaccacattatcacggacggcgcctccatgaatatttttgtcgaagaactgattcaattgtatgacggcaaagagttagctccgctccgtattcagtacaaagactttacggaatggaaacatcaaaaagaacaaagagaacgaatcaagagccaggaagagtattggcttggtgtatttcatgaagagctcccgtcattcgagctgccgaaagattttgcgagaccgccggttagaagctttgatgggaaaaggcacaattttacgctcgataagactgtcacccaagggataaagcagctggaagaattgaccggaacgaccgcttacatgattctattctcggcctattccatactgctggcaaaatacagcggtcaggatgatatcgttgtcggtacacctattgcagggagaccgcatgcggatttggaacccattatcggaatgtttgtcaatacattagccatccgcaccgctccaatggcggaaaagacatttttggattatataacggaaacgaaagaaaccatgctgaaggcttttgaacatcaagagtatccttttgaagaattagttgaaaaactgggtgtgaaacgggacttaagccgcaatccattgtttgatacgatgtttgtcctgcaaaataccgaacaaacagatattgaagtggactctctcgcagtcaggccttatgaacaaacagagacggcagccaagtttgatttacagctgaacttcttaatagatcaagatgagattcagggcagttttgattactgtacgaaactgtttaaaaagaaaaccattgctgtattggccaaggattacgtcatgatcctttcggcgattatgagaaacccatccattcctttaaaagacattcaattaagcgaaaaagtaaacaaaagtaaacatctcgcaagcacaatcgaattggatttctaatcacagggacagcggctgtcccggcatgaatgccgcggctgccgccagtcgcctgaaaacaggaatgaaaccaactggagggatatgagtgtcagaattcaaacaacaggagttgttctggggccgaatgtttcacacggaagaccgtcctagtgcattcccttcgtttcaaatgtccgactcaacagtaaagcgtgatataacaagtggatctgactgtattcacagttcattgagtgcggatgtatcacggcgcatcctgaccatgacgaaccaaacgccaatggccgtctatctggttctcctgatcggaattgaatcccttttatacaaatacacgggggaagaaggcgtgattacaggggttccaacctttgaagacgaaactgatgaagatcttcgttcagaccagctcatgttaatcaaacagcatatcaattccggcagtacgtttaaatcaattttccatgaattgaaacatacgctggacgaagcgatcttatatcaggacgttccctttgataaaatggccggacagctgaggctgaactacaatgcaaatcatttgccaatcatcgatacagtcgtttcactagagcaaattcatcctgatggtttcatagaaacggctgctgcagatgctttattccagtttgctatgggtgaagacttgattgacataaagttatgttttaatgaacaagtctatgaccgtcagtatatgatgcaggtgctcggacatttaaaccggctattttctgtcatattatttcagcctgagctccccctcggtcaagtgaatattttgccagaatcggagacacattcacttctcgttgacaatcaaactgcgaaaactgaatatccgcgggataagacggtttatcagttattcgaagaacagatgaaacgaacaccggatcaagcagccgttatttacggagaaaagcaattcacatatcgtcagctcaatgaacgtgccaatcaattagcccgaacgttaaggaaaaagggggtaaagacggatcggctcactgcgattatctgcgaacatgagatcgaactggtcgtgggaatactggccgttttaaaagcgggaggggcctatgtgccaattgatccggattatccgaagcatcgcatacagtatatagcagaagactcccaagctgatatcgtcctgacgcagagccatcttcaaaaacagttggaacttgcgggcacaatggttttcctcgatcaggaaagctcttaccacgaagacggctctgacctggaaccgatcagcagtacgaaggatttggcctatgtcatttatacgtcaggctccacaggcaagcctaaaggagtggcaattgagcatcagggcttaaccaattatatttggtgggcccgccgggtctatgtcaaaggggaaaaaaccaactttcccctatattcgtccatcgcttttgatctgacgataacgtctgtttttactccgctcattacaggaaatgccattattgtctacggaggagaaaacagtgctgccttgcttgattccattattcaggattcaagggcggatattatcaagctgaccccggcgcacttgcagttattgaaagagataaatatccctgctgagtgcaccattcggaaattcattgtcggcggtgacaatttaagcacgcggctcgcccgaagcatcagcgggaaattcggcggaaaaatcgaaatttttaacgaatacgggcctacagagacagtcgtcggctgtatgatttattcctttgatccgcaatacgacagacgggaatcagtgccgataggaaccgccgcggacaacatgaacattttcgtgctggataagaacatgaagccggtgccggccggcgtcccgggagaaatatatatcagcggggacggcatcgccagaggatacttgaacagagcggaattaacggcggaaagatttttgcagcacccctttgtaccagaggtgaaaatgtaccggacgggagacttagcaagacggctgccggacggaaatatcgaatatttaggccggatcgaccaccaggtgaaaatccgcggttaccgcattgaaatcggggaagtcgaatccgcatttttccaaataccgccgattcaagaagctctcgttacggcacaagaaaccaacggggaaacatccttgtgcgcctattataccgcacagcattctttaaccgcaggcgaaattcgggagcacctgtcccggcagcttccgtcctatatgatccctgcttattttgtacagctggcagcgatgccgcttacttccaacggaaaaatagatcgtcaggcgctgcctgctccaacgggaaatctcaccggcaatccttatacagctccgcggacagaactggaaaaaatactggccggggtgtgggaatcggtattaggcgcagaacaggtcggaatcgatgaccatttctttgagctgggaggagattcgattaagtcgattcaggtaacctcaagcttatatcaagccgggtataagcttgacatcaaacacttgttcaaacacccgacgatctccgggcttgctccttttattaagcccgttacccgaatcgcagaacaaggggaaatcaaaggccgtaccttattgacgccgattcagcattggtttttcgcccggcaataccctgatccgcaccattataatcaatctgtcatgctttattttaaagaggggttggacgaatcgaagcttcagaaagtcatgaagaagattgccgagcatcacgatgctttgcgcatggtctatgttcagggagatcatgaatacgaagccagaacccgcgggatcagtgaaggagaattattcagcctcgacgtattctctttactcgaagaaaacaaccctgccgaaacgatagaaatgatagccaatgacattcagcaatccatccatttagccgatggtccgctcatgaaactgggattgtttcaatgtcgggatggcgatcatttgctgattgcgattcatcatctggttgtagatggcgtatcgtggaggattttacttgaggatataacgtcagcttatgagcagctccaaaacggagaagcgatcacgctccctaagaagacggattcctatctgttatgggctgaacgattgaaacgttatgcagaaagcccggaatttgaagcgaaaaatcaatattggcttgagcagaaacatatctcgcaacacaaattgccagaggataatgagcaggagaccggtctggccgaagaccgggaaacgatcatcgtccaatggacagaggaagaaaccgagcgtttattaaaaaaatcgaaccgtgcctatacgactgacattaatgatttattgctgaccggactcggaatggctgttcatcgctggacggggcatgaagaaattcatgttcatctggaaggacacggcagggaatctgtttttcaagacgttgatatttcacgtacggtgggctggttcacaacccaatacccggtttctcttcaaatccaggcggaccgggacatctcccagcggattaggacggtgaaagaacagctgcgtcagattccccaaaaaggaataggatatggcctgatgaaatatttgtccgatcatccgaaggcatcagaatggaccggacatccggaaatcagcttcaattacctcggacaatttgatcaagatttcgaaaatggaggaatcgaggtatctccttactccggagggaaaattgcgagcgacaggcaccccattgcctatacgcttgacattaacggcatgatctcagacggtcggctgtcattggccatcagttacagcggtaaacaatatcgaagagaaacaatggaaacatgtgcagctctcttaaagaaaagcctaaaagaagtcatcgaacattgcgcagctcaagaacacattcacctgacgccaagcgatatttcgctgaaggacataacaatcgaggaattagatcaatttgttaagcaaacacagcatatcggcgacattgaaaatatatatcctttaactcccatgcagaaaggtatgctgttccatagtttaatcgattcggcttccagagcttactttgaacaagccgcttttgacctcaaaggcgacttggatattgaggcatttacaatgagtttgtcgcagctggcggaaagacacgagattctccggactcatttttatacggaatggaaagatcagcctttacagatcgtattccgaaaaaaaccgatcgaaataactgttgaagatattcgaagcatgaagaataaacaacgaaacgagttcattgccggctttgtacaaaaagataaggcaagaggattcgaccttacccaagatgcgttaatgcgcgtatcaatccttcgtacagaggacgaccaagtccgattgatatggagcttccatcatattttaatggatggctggtgtctgcctcttattacgaaagaagtgtttgaaacctattatgagcttcttgagagaagaaaaccggagcgggaagccgtcaccccgtacagccgatatatcgaatggctaaaagaccaggatcatcagaacgctttggcctattggcaaaaatatttggacggttatgaaggacaaaccgttttactgaaagaacctgtctcaaaccaagccaagaaatatcaaaaacaaaggcttgcatgccggctcggaaagcagctgtcagaagaaatcagacagactgcaagcaagcatcacgtcaccgtgaatacattcattcaaagtgcgtgggggctattgctgcaaagatacaacaacagtcaggatgtcgttttcgggtcggttgtatccggacgcccggcagaaattccgggtattgaatccatggtcggcttatttatcaacaccattcccgtacgtattaccgctcagcctggaatgactgtggaacaagtgttgaaaatgagccaggagcaggcattggcctctcaggcgtatgatacatttccgttgtatgaaattcaggctcaaaccgaacaaaagcagcagctgatcagtcatatcatggtatttgaaaattatccggtcgagaaacaaatggagcatatgaaaccgaatcgtgacgcgctggacattatcaatttccatatggaagagcatacccattacgatttcaatttcattgtcatgccggctggagaaatcgacattcattttgtatacaatagcaacgtctatgatcatgcaagtgtcaagcggatggaagagcattttatgcaaatcattaagcagatggtgaacagtcaggcgattcgcgtccaagacttggatatacttacgggagatgaacgttcgctccttatagaggcatttaatgatacggaagcagattatccaaaggaaaagacgcttcatcaattgtttgaggaacaagcacagcgtacgcctgatcaaacggctgtcgtatacggggaaagccagctgacataccgggaactgaatgaaagagcgaatcaacttgcccggacattgcaatcagaaggcgtgcagccggatcagccggtcgggattatggccgaacgttccttggaaatgatcgtaggactcttcggaatcttaaaagccggcggcgcgtatgtgccgatcgacccgagctatccggtagaacggattcactatatattggaggattcggatacgaagctgttgttagcacagagtcacttgagaaaaagcgtgccttttacgggaaaaatgcttgacctggaagatccgcgattctcttgggaagatggttcaaacttgaaacagacggccggaccgaatcacttagcttatgttatctatacttcgggatcaacaggccgaccgaaaggggttatggtggaacaccgatccgtaatcaaccgtctcgtttggatgcaggaacattacccgctggataagcaggatgtcattttgcaaaaaaccccaatcacctttgatgtatcggtgtgggaattgttctggtggtcgatgactggttctaaagcggtattgctgtcaaacggaggagaaaagaaccctgacgtcattttagatacgattgcgcagaaaaatgtcaccattatgcattttgtgcctgcgatgctgcatgcttttcttgagtccatggagcagaaatccgacgaggaattaaagagaaagctggcgtcattaaaatatgtatttgcaagcggcgaggctttgacgcctgcgcacgttgccgggtttcatcgcatgatcacaccggcgggcgaggctcaaatcattaatttatacggaccgaccgaagcgacgatcgatgtatcgtattttgaatgtgaagcgggagaaacgcttaactccgttccgataggtaaaccgatttccaacattcaattgtacatcgtacagcccggatcggaatatttccagccgctcggtgtggcaggagagctgtgtatcgccggagacgggctcgctcggggctatttgaaccgtccggagctgacagctgagaagtttgcagctcacccatttgaagcagggaagcggatgtaccggacaggcgacttggcaagatggctgccggacggaaatatcgagtatttgggacgaatcgatcatcaagtgaaaatccgaggctaccggatagaactcggcgagattgaagcatctttattacaactcgatgctgtcaaagaagcggtcgtcatcgcgattgaaaaagagggctcaaagcagctgtgcgcttacttgtcaggagacgagtcattaaatacggcgcagctgaagcgtcatttgctgaacaaactgcctgcgtatatgattccggcttattttgtacaagtagagaagatgccgataactgctaatggaaaaatcgatcgaaaagctttgccggctcctgagggaaataggcttaccggaaccgaatacacagcgccaggaacgttaattgaaaagcagctggccgatatatggaaggatattttagctctgcctgaccccgggattaaagatcacttctttgacgttggcggccattcacttaaagtattgcagctcattcatcaaattaacgccggtatgggactcaacatgcattatcaagccgtatacgattttcctaccatcgaaacaatggcacgcgccattcaagcggcagttttcgaatccgagacggatcataacgtattcgtcaagctgaaccaggaagattcaatccctgtgttctgtttcccgcctttaatcggatatggactcgtttataatgaaatggcgaaaagacttgacggcgtcagcaccgtctatgctgctgatttcttagaagagccgtctcatgagaaagaaatcgttgaccgatatgcagaaagcatgatacgcattcaggaacaagggccttttgttttgcttggttactcttcgggatcgaatttggcttttgaggctactaaagctttggagaagcgaggccgcaccgtatctgatgtgattatgctggattctaaaataaccacttctgtaactcatttatcggaagaggaaatcgaagagatcgtccatctgaatatggacattattccggactattacagagaaatattaaccattccttcgattaaggataaaatcagaggctatcttgcgtaccacaatgaagtgatcaattccggcgccgttaacgccaacatccatcatttgctatgcggcgatgtaaccgatgataggggctggacacaatcaacagcacagcattatcttgagtacaaattaaaaggagatcacgtgacgatctttgaacctcacaacatcgaagaaaatgcggaagccattcgatctattattaaaaagattgaagaacggcatcatcacggacttgttcttgaagaacaactgtcaatgggatcgtttgcgggggacgcaaagtttgacaaaatgtaaatgatcaagtgtaaaacgccgctggcctggcactcagcggcgtttttattaaaaaggcgagagtcatactcctgtgttcgcaaggtttactccagagccgttctccatgaccagttgtcatcaaatggtaaaaaaatcatcatacattttaaggaaaaaggaggatgtcaagttattagaaaaaagtgtagcgtatgtttatgggtactagctctattattgagttgcttaactgcggagtctgctttttactgccggtactgcaatttgttctcagatggtaaaagttgcctaaatttttaaaaaaaggaggagcgttaagttatgtgtaaaaaatgttgggtatgcctatgggtccttgctttattattgagctgtttacctggggaatatgcgaatgcggtaagcattccaattgcaaaacatgttgggaattcaaatccgcttatagaccatcatctgggcgcagatccgtttgcgctgacctataacggaagagtctacatctatatgtcaagcgatgactatgaatataacagcgacggcacgattaaggataattcatttgccaatttgaataaaatatccgtcatatcttcagcggatatggtgaactggacagatcacggagcgattcccgcagcgggtgccaatggggtgaatggcggccgggggattgccaaatgggcaggagcatcatgggccccgtcagccgcggtgaaaaagatcaacggtaaggataaatttttcctttatttcgcaaacggcggcggaggtatcggggttctcaccgcagacagcccgaccggcccatggacagatccgatcggaaaaccgctggtgacgccaagtacaccaggaatgtccggcgttgtatggctttttgatccggcagtattcgtagatgatgacggtaccggttacctatatgccggcggaggcatccctggaggttcaaatccaacgcaggggcaatgggccaatcctaaaacagcaagagtcatgaaattagggcctgatatgaccagtgttgccggaagtgcatctacgatcgatgcacctttcatgtttgaagattcgggaatgcacaaatataacgggacatattactattcctattgcatcaatttcagcggcgcgcacccggccgataaacccccgggtgagatcggctacatgaccagctcaagtcccatgggtccctttacatatagagggcactttctgaaaaatccgggtgcatttttcggaggcggcggaaacaaccatcatgccgttttcaattttaaaaacgagtggtacacggtgtatcatactcaaactgtcagctccgctctgttcggggccggcaaaggataccgttctccccatataaataaggttgtgcataatccagatggctccctgcaagaggtagcggcaaattttgcaggtgtcaaacagctatccaacttgaatccatatcaccgggtagaagcggaaacgtttgcctggaacggacggattttgacagaggcatcctcagcacccggcgggccggtcaataatcaacatgtcacaaacattcataacggagactggattgctgtaggaaatgcagacttcgggtcagacggtgccaggacgtttaaagcaaatgtagcatccgctcttggcggaaaaatagaagtgcgtctcgatagtccaacaggtaagcttgcgggaacactgaatgtcccttccacaggcggaacgcaatcttggagagaaatagaaactgcggtaagcggcgcagccggtgtgcacaacgtattctttgtatttaccggaacaggttcaggaaacttgtttaactttgattattggcagtttacgcaaaaatagcatcagtactgtgatttaaaagcaggacagaacacatttttctaatacggtaaaagacagataaaggagaggaaaaattgatgtcgagcgtaaaaaaaacaatttgtctattattagtatgtttcactacgctgtcagtaatgttaatgggcccaggcgctgctgaggtcttggcggcaagtgatgcaacagttaatatatctgcagaaagacaagtgattcgcggttttggaggaatgaaccacccggcttggattggagacttgactgcggctcaacgggagaccgcttttggcaatggacagaatcagttaggtttttcggtcttaagaattcatgtagatgaaaatagaaataattggtacaaggaagtggagactgcaaagagtgcgatcaaacatggagcaatcgtttttgcttccccttggaatccgccaaacgatatggttgagactttcaatcataatggtgacacaacagctaagcggctgagatacgataagtacgccgcatacgcgcagcatcttaacgatttcgttaatttcatgaagagtaatggtgtgaatctgtatgcgatttctatgcaaaacgagcctgattacgctcacgaatggacatggtggacgccccaagaaatcctgcgtttcatgagagagaatgccggttccattaatgcccgcgtgattgcgccggaatcatttcaatacctgaaaaatatatcggaccccattttgaatgatccgcaggcgcttaggaatatggatatcctcggaacccacctgtacggcactcaggtcagtcagtttccttatcctcttttcaaacaaaaaggaggagggaaagagctatggatgacggaggtatactatccgaatagtgacaacaattcagcggatcgctggcctgaggctttaggtgtttcagagcatattcatcattcaatggtagagggagattttcaagcttatgtgtggtggtacatccgcagatcatacggccctatgaaagaagatgggatgatcagcaaacgcggatacaacatggctcatttctcaaaatttgtgcgcccaggctatgtaaggattgatgcaacgaaaaatcctgaaccgaatgtttacgtgtcagcctataaaggagacaataaagtcgtgattgttgccattaataaaaataacacaggggtcaaccaaaacttcgtgttgcagaatggaactgcttcgcaagtatccagatggatcacgagcagcagcagcaatcttcaacctggaacggatctcaaagtaacggacaatcatttttgggcccatcttccggctcaaagcgtgacaacatttgttgtaaagcgttaaaggcatcagcatcgcaataagccaattttcttactcaataaagaaaattggcttattttctgtgggagagaagtgttgatttttaacgatacacggacattgggtataataatgacaatgacttcaaggagtgatcaatatatgtcacggcttcacagcaaagtattaatcatagacgatgaaaaagaaattttggaactgatcaaaaccgtattaataagagaaggcattgatcgcgtagtgaccgcttcgactgcccgtgacggattggctcaatttcatcaagaaaatcccgatcttgtgatattggatatcatgctgccagacggtgaaggctatgatatctgcaagcaaataagagacatttcacacgttcctattatctttttgtctgcaaagggggaggaaacggataaaattgtaggacttgccatcggcggggacgactacattacaaaacctttcagccctaaagaagtcgcataccgggtcaaagcgcagctgagacgggtctcttacttacagccttctcaaaccggaaccctaataaaaaaagggccatttgaattaaaccaacaacaagccgagctcaccaaaaatggagcggctattgagttaacacctaaagaacttatgcttatgacctattttctgcagcatcccaatcgggtgatcagtaaagaaacactctatcaagctgtatggggagaagatttcttcggttctgacaacacggtgatggttcatatacgcaggctccgtgagaaaatagaaaacaccccgtcaaaaccagactttctcgtcactgtgaaagggttaggctacaaatttgttgtaaaggatgcataaggatgaattggcgattaacaggcagatatatggtctctgtcattatcgtgaccatcattacagtcttcattaatttatttatttttatgttttggctcgttttccaggcgaacagccaacatgacgaagaaagtacaccggaaactttcacaagatcattccgacaatatgtcacgttatcgaacaatggtatcacggtaaacaaagagggccaaaaagctttaaaagagcagaatgcatggattcaaatattagatgaaaacggacaggatgtttatcatgatagagaacctaaaggactgaagaaaaaatatacgcctattgaaattgtaaatttacataaatataaggatgaacaattattatcaaccatttacgccggcggaaaaaaagtaaacggcaaggagtacagttactttatagggtttaaaaatccctctctcggaaaatttgtcctctcatatgataccaaggaatttgtgacgaagttcaatgcaggaaccatcatattattatcaatagatgcattgatcgcgttagtcattggctatctattcagccggcagctcacaaaaccgctcggccgtgtcattcaaggaatccagcggttagctaatggagattatacgatcaacatgaaacctaaaggcatttataaagatgtcttctataatgtcaatcatttatcggaacaactatcttcaagcaaaaaagaaaaagataaattagagcaaatgcgtgaagagtggatcagtcatatttctcatgacattaaaacaccattagcatctattcaaggctatgcagaaatcatcaaagatccaaattaccatctcacagccgaacaggtcagagagtacgcccagatcattgagagtaaatccctctatatgaaagatgtgatggaagatttaaatttaacgacaaggctgaaaaacaacgatgtgatgttacatacagaacgggtaaaccttgtatcgctgctgcgggaaacgttaattgatatgttaaacgattctagatatgcggataagtccattgaacttcaaacgaacgtggaaaagctgatgctgaaccttgatgcgatattgattaggagagcggtcacgaatctcattttaaatgccctcgttcacaatgatcctgatgtgaagatcgttgtacggcttgaacaaaaagaacggactcatgtgaaaattaaggacaacggcaaagggatagaagaagaggagctggaaaaagtgtttgatcgctattacaggggcacaaatacaggaacgacgcatgcaggctctggtcttggaatggccatagcaaaggatattatccaaaagcacggaggggacatcaccattcacagcaccgcgggagaagggacaacgatagatatacaattatcataatggctatacaaaaaaacggttctgttgattaataacagaaccgttttttcctattgttccgaaaacactttgattcctttgacaatgttccaaatgaaaaaatagatcgccacaaggaatgtaacagcatacgtcacaagcaggaaaggcccggcgtgcctgatgtcattcataccaagtaaacctgaagcgatgatgccaataccaaaaatcaaataaggaatcagatgcgtccacaaagattttttcgcatgatatttcacatcatcctggcctaagaaatagacgataatcggaaacagaaacggcgcaaaaaatatactgaagtaacataatgaagacaaaattttattttctctcaaaccttttcacctctatgatttattgaagggggaattcttctggctgaatccctcactgaagtacaatcttattgtacaactccaaccttaacccgtattaatccgaaccttacatcaaccttaaattaacaaggactcgtcttcttacagcaatcataagattcaatgccatactgagactcatcacattcagcgtgtctacgttggaaatacatttaatttttcgattcgattgaaaaatgacgtgtaaagtcccgattcagcccggttttctttgttctatatgtgtcaggtgtgtcttattcaatagagatagagcaaattgacagactttaacacctcccaaaaacaagaaattaggttgatagacaatcatgagaaagatttttacaatgagttcgagctcataagaaagagccaaaatgatgcgaaggaggaaaagatcagatatgaaacggtcaatttctatttttattacgtgtttattgattgcggtattgacaatgggcggcttgctgccttcgccggcatcagcagcagagacaaaaacgccagtagccaagaatggtcagcttagcataaaaggtacacagctcgtaaaccgagacggtaaagcggtacaactgaaagggatcagttcacatggattgcaatggtatggagatttcgtcaataaagacagcttaaaatggctgagagacgattggggcataaccgttttccgcgcggcgatgtatacggcagatggcggttatattgacaacccgtccgtgaaaaataaagtaaaagaagcggttgaagcggcaaaagaacttgggatatatgtcatcattgactggcatattttaaatgacggcaacccaaaccaaaataaagagaaggcaaaagaatttttcaaggaaatgtcaagtctttacggaaacacgccgaacgtcatttatgaaattgcaaacgaaccaaacggtgacgtgaactggaagcgtgatattaaaccgtatgcggaagaagtgatttccgttatccgcaaaaatgatccagacaacattatcattgtcggaaccggtacatggagccaggatgtgaatgatgctgccgatgaccagttaaaagatgcaaacgtcatgtacgcgcttcatttttatgccggcacacacggccaatttttacgggataaagcaaactacgcactcagcaaaggagcgcctattttcgtgacggaatggggaacaagcgatgcgtctggaaatggcggtgtattcctagaccagtcgcgggaatggctgaattatctcgacagcaagaacatcagctgggtgaactggaatctttctgataagcaggaatcatcttcggctttaaagccgggagcatctaaaacaggcggctggccgcttacagatttaactgcttcaggaacattcgtaagagaaaacattcgcggtactaaagatttaacgaaggacggccctgaaacgccagcacaagataaccccacacaggaaaaaggcgtttctgtacaatacaaagcaggggatgggcgtgtgaacagcaatcaaatccgcccgcagcttcacataaaaaataacggcaatgcgacggttgatttaaaagatgtcactgcccgttattggtataacgcgaaaaacaaaggccaaaacgttgactgtgactacgcgcagatgggatgcggcaatctgacccacaagtttgtgacgctgcataaacctaagcaaggtgcagatacctatctggaactggggtttaaaacaggaacgctgtcaccgggagcaagcacagggaatattcagcttcgtcttcacaatgatgactggagcaattatgcacaaagcggcgattattcctttttccaatcaaatacgtttaaaacaacgaaaaaaatcacattatatcatcaaggaaaactgatttggggaacagaacccaattagtaagcttaaggcggacatcagcaacgatgtccgcttttgtcatcttaaacagcaatacaaggaggtttacgtggcggatgaactctgaaacagtatatgggcctgtacaaatgttgttagcaatctcaagaaagccaaggagtagatatgattcactgaacatatgatgtaatcgtttcacagttttgaaaagcgtttatagcgcaatgtatgtatttcacatccgccacattttttacgtaagggggaacaagagaatgaaaaggtatgacgcatttccagagccaattggcggctatactgtcggccgaatccagatggattttgagtacacggcatcagatcatacaaaaagagaactgacggcgtttgtatactatccgtccgacagcagcgaaggtaagactacatcagcctacatgtttcctgaagtctgcgaaatgcttgatgagcagccgcttctcactgcgttgaaggatgcttactctatagatatcaagacccaatgttacgacgaccttgctctctccgggaaggaaaaacgctatccggtgttattctatgtttgcggcgggggcggttctccagaatggggtacagtgatctgtacagacttggcaagcatgggatatgttgtagtaagcatcggccatcaaaatagcacgatgtataagcgtaaagatgggcgcctgtttaatatatcaaaggatttttcggatgtcattatggcgttttctgaagatccggagatgctggctttggctggtaagatggagatgcggcccgacgatgaaactgccattgagatgtgtcaaaacgtgcttacactgccgatacttgacaagttaacagagtatagtgaattacaggcagaagatgtaaggtatgtagccgattatcttgtcaaattggattctggagagctgaattcaatctttaagggcagattgttgcttgacatcggcatgggcatagtcggacattcttatggagggcctacgacggcgattgtttgcggggacgacgaccggttcgcctgcgggattggcttggatagcggagcgttcggccttcagggcagcgacattaagaaaccctttttgctgctgttttctgaaccgaactataacatgaatgcgatcattggcgctaacaatagcatggatacctattatttctctgttgatcgtgctgcgcatttagattactgcgacatcgtgtttaccagtgtgaatgaggaacttagaggcgaacgggatgccatggagatgcgaaatcttgttacagactatacgaagaacttttttgatcattacatactgcagaaggctgcaagtgtggaaagtctggcatacgatggcgtggacttgatcaagaagaccagcaacaagtgacataaccgattaaaatactcaaactgaaaaacctttatgaccaatttaatttattaaggacgtagaggttttttaatattatattaccttataaaaaggggatgctcttagaatatagatccacttttatattctctacataatttctagtttacataatatatattctaggaagttaaacaaagaaatgaattatccgtctcataaattaagtatactttagttattgagacggaagagaaatttataacgaactaaccgtacattgtgttattgcagtcatttcgttacacgtataaaaatgtttgcagcgttaggtttgattcagctttggcctttacccggaatgagatcatttttagggacagaaataaaaaaaccatgtctggtaatactttgccgcatcttccctgcttttttccgacgagttttcgcatcggctccccacatatgagcaagtatgacagtcgccagcccgagcaccccgcgaaataaaatccggctctgaaccccagccaatcattaaaaaatcctgcggccaaaggtcctccgaaaataccgagtgcataaagcgcctggtatgcccccgtcgatgttgttctcatgtctgccggaacagactcaatcgacattccaagcagcaaaggaaaaataatgcccgagtgaaaaaactattaaaacctggaccagataaagcgccatcgggctgacggtaaaaggaatgataaaaataaaaacggctgcgagtcaataaaacagctttaatgttacccagttttcgcatatgcgaactaaagttcctatcactagcagagccagtgcgtgcttagtcataaacgaaaagacaacaagctgatttctttctcgccattgtgaagccaaacattgcggtcgttttcatttcgcgaatcatgaaagacaggcaaagaccgaggccgctcccgatcccaaatgccgcgtgccatccccattccctgacaacataaccgctcatgctcatccctgacagctgagctaacacgtgaataaatgagatccagcgcatggctcctttcgtgtcatccgccgcaaaatagctcgtaaataaaatggtgaatataacccatgtagatgagaaaaagccgcctgatgaacagacggcgctgcagctagttatttgcttcggttacctgcggaagcatgagtgatccgataatgcacagttaaaaatttcagtccgaacagccacatatgatgaacggctttcaggcttgttttgctctgggctgaaataagaaatgtctctgccagcggaagatgacacgtcccccatttcgtctgcagataaatcccttcatcacccgctccgctttttcgccgtctgcttgtcaaaacaagattctgcttacgcgcataaggctttaaaatgcccgtcatttggccgtacggcagcggaagagagatattcatgtatccttccccttttgccctgtacgctgaatacagcgcagtaaaaacggtttcctgcttttcatttgttctgatccacgcacggacattttttctgctgtctttgtcagagtcaactcctataatatcactgtgcataatataccaatccggattcatggacaggtgaatctgccccgctcttctgctgaacggctcgtacacgcgcgcgaacggacgaaaccatccgctccacgtcacttttgccatgatgtcataatcaattgtctcttcataaaaggaattaacggccggcgccagtttttcagttgaaaagtcttcagaatgcagttctctcatctgatccagaaggccggtataatggatgtcatttgctgcatgaatatcagtcaaaaagtctttgcctatcgttctcttcccgtaaatacggctgaacgttctttcgctgccctcatcaaacggtctcggattttccaacctccaccccgccaaagccggaaggataacgccgaatgcattgacggccccgtgaatccaaatcatctggctgatcgtgagcattgcctcctcgcggtagacaccgtacgaatatatcaaagaaaaagcaattgtgatcattaacacagccgaagaactcctgatcaagatcctgcctgttttcgtaacaaacggcaccgtaaagacgagatatgcatttacatacagacccgccagatacagagcgacagcaatcacatcaagtgtttttgaaaatgtaatccccaaggcaataaggatcggcgaaatcaaaataatgaccgtgctccatctgtaaagaacccgtttctcccgtatgatcctgccgagcaatccgttaaagatcggaatgagaaaagcggaatagtgaaagtgcaccgccgtcagcagaacgataagcggaccgaaattcataacgggaatctcaaggacatatgcgaagaaccagaatccgcccccggccaaataaatgaaacccgccataacagacatctcttctgttctgtgaatatttgttttcatcagccgccgggcagcatacagtgccagcccaagcgtataaatgagccacacaacggcaaaaaaactgaagtctgtgacaagcgcaagcaccgcacataaagcggcaacaggataactccgtaataacacattctctaaggtctttgacggccgaaaagcaaaatcgaatacagcgggaacgaaaaaaagtacggaaaataaaacaaacgtctcagcagctgatatatgcggagcttcagccgccgcaaatcccaaaaagcaaatcacgcttaccatgagatgacgcttcagcatgtttccccctctgtttcacggaaagtcccccggtaagagaaaagcgtgccgagtatccggtttttcacatgaacctttatgctgaagcaattcatttcctcatcataagcctcataaacggttgaactgccgcacagccatgccggaagcgggattttctttccgactatcaggagccactgccttccggatgtaataacaagccctccgtctgaagacgcttctaaatgcagttcagacagtaggatgcggggtttgccgaagtaatcaagaattctgttttcccgctcatcatattccatgactgcatcaaaaaaacgcgttttgcttttaaagaaaaaggtacgattccattccacgctattttgcctgtttttgttttcgatagtgaaagggatatcgtttcccctctctgagaaaaaacatctgaaaaaaacacctgtctttaaaagcattctgacaagaaaagaacctccctttatttctgacataactccttctccgcaaaacgtgcgtgatccgtcaaatctgtaccgcttctgcagcatcgggtgcagtgattgataatgagtaatcgctttttcatacattgaatccgtcatttcacttctctctttcgttttgtatgccaggcgctcggcagcttgagcttaagaatcatgccggctattgtaagtactcctaatgagatcaagaatccgccgcccgaatatagcagtgccgttacacaaaagaagactgactgcccggtgtgaatcagccactttctccgcatgggaagcagccataatacccctaaccctgtctccagcgctcccctcacgatctctgcatcggcacagccatcatgaaagccttgaaaaaaccaatacagactgaatacgagacacataaagacatagacaaacccgaaacggactgatatcttcggatgtctgttttgttctatccaaagccgcaacgcatcaaagctccatgcggtagcccagcttagcagaggacgaaataaaaaccggtctatccaacttcccggcagaccgcgggccgtttcatattgatattgagtcaaaaatgcggtttgtccgttatcccgctctatatacttccagtagcccctgccttcttttataagtgacagcggatgatcagaggcaaaagcgagcgaagacactctttctgacgagcgaagccttatgtcacctattgattcgcccgtgccggataccttcagcccaaaaccgattcgtgtttcatatagaaatctctgcggttcatctggcagcctatgaagatatgtaatgtcagaaaaccgcagatcccattccttatgaagatgcgggttttgcgtatattcccaaagcgtttctatatcagatgcaatattgattgcaacatatatcggcttctgcttcatgtcccctcctcttcccttcttttgtaaacaattcctatattatcataggaacagatcaagcggcagaacgaaaaggccatcccgttatcggcaggacagcctcagtggctttgatgacttatgaataaggtatcgtgtctttattatcttcagaagcggtttgaatgataatcgggcgcacgaaacggattaccgcagccgaggccaaaacggctaatccgcctgcaagcaaaaacgccccggagaatgatccgcttttgtccgcgataaagccggttaaagcaggcccgataataccggccgtgtttgcaagaaaatgcataaagccgccgactgacccgacattcctttgatcaaccacatcatgaattaccgcccaatagatagagcctgttatatataaaaagaagactgataaagcaacgagaataacggcacttacggtagtggtaacaagtccggcaaatccgatcagtacagcggaagcgaacaaacaagtgacaagaatgactttccgtgagaacaaaaccccttttccggcagtttttttgaatacataatcagaaatcattccgcctgccgccaaaccgataaatccaagaatccagggaataacagtcaccacgctcataaattcaacacttaaaccgcgttctttcaccagatagctcggaaaccatgttaagaagaaaaataagatgtaattgtaagcgaaaaaggcaaaagccgtgaagagaaccgttttttgtttcaaataaaaggtcatcgggatatgctgctcatgcggttgaatctccgctttcattgccggggcgtcttccgtcggcgccggccgttctttgacaaatttaaaccagatgaccgcccagactaaaccgatgatcatgatcaggacaaaggaaactttccagctgaacgccacagcaatcatcccgacaatcgggccggaaatcgccccgccgagcggcgtgccgctgtttgtcaggccgatgaccgtggcgcgctgagacggaggaaaccaattgttgaccattttgcttatggcagccgacagcggcccctctcccataccgaataaaacacggataatcaaaagacttacaaatccgaaagcaagcgcaaccgctccgctgaaaagagaccaaacgatcatcgccgtacacaatgtcaatttagccccataccggtcagatgcaacaccgccgagaaagttaaacacagcgtatccgacagaaaaactgctgaaaatcagccccatttgggttgccgacaatgtgagatcctgctgtatgaacggcgctgcaatagacagcgctgagcggtctaaatagttaatcaccccggctgaaaataaaagaagaataatagggaatctatcttttgagaacataaaaaaatccccctctcatttcgcaatattcagacatttaaattgccggagtaaaccggtttatgcaatgaaaccggttatccggattgccttgcgagcagcgccggtttatagcggtgaatccgtttttcaccgccatctttttcttgtatctgacgaagaagaaggcttcccgcttttcgcgccatttctgccgcaggctggacgatcgtcgtaattggaggagtaaaaaaaccagcaaaaggaacttcatcaattccgatgacggctgccttatccggaattgccatatcatgctccttcatatacttcagcacctcaacaagaacgatatcgtttgccgccaatatcgctttcggaggctcctcaagtgagaacagctctgacaaaacattggaaatatcagctgcatcggctgttttgatatattcgtcccgcaccatcataccgtggcggtcaatcgccttcttatacccttcaatcctttctaccctcggactgatttcccgaataatagacgtcgtaataatcgcgattctcttaatgccgctttcgataaaccggtcaacggcaagaccggctgcatgatggttatcaagcatcactgtcggaattccgagttcttcaatggttctgtccataaacacgaccggaaacgtatcgcgtttcatcttttcatataaagagagattttcacccgtcggaaaaataataattccgtccacctgcttagcccgcagcatttcaatatatttcttttctttttccggttcatcatccgcattgcagacaataatatgaaatccttgttcatgaaaatagtcttccaccgccctgatgacctgagtggaaaaagtgtgaagaatattagccaccaccacacctaccgtaaatgttgatttctgttttaagctgcgggcgacgaaattcggctgatagttcagctcttgaatggccgcttctattttttgtttcgttttctcgctcatatagtcatagcgctgatttaaaaattgagatacggtgcttttagatacgtttgcatatttcgccacatcagaaattgtaatggttttcatagactcatccccgtctgccttcatttttcactagtataagtcagaagtaaatggtttacaatctgacagggacatggattctgtcatactccggaataagccataaaacctccgtcgacgggaacggtgaccccggtgacaaagcctgagcatgaatcatccgaaagccacaggagcgttcccagaaggtcttccggtttcccgaaacgtttcatcggtgtatgtgccataatcttattggatcggtctgtcagacttccatcttcctgtaataacaacccacggttttgcgcagtcaaaaagaaacccggggcgatggcattcacccgcagccctttttttgcgaaatgaacagccatccacatcgtaaaattctgaatcgccgccttggccgcgctgtaggcgggcacctttgtcatcggtgtatacgcactcatagaagaaatattaataatcgcgggacattccgccttcaaaaggtcttttccaaacacttgcgatgccagaaatgcaccggtaaagttggttgaaaatacgctggaaaaccccgtttcgtccatatcaaaaaatgatgtgccctgctcatcctcttcatacgtctcgctggcagtgatcgcatcagggtggtttcccccggctccgttaattaaaagattgacagaaccgaaccggctgataatctcgtcttttgccttttcgagcgaatcacgggctgaaacatcagccggtacagaaaccgcggttcctccagcatcagcaatctcggccgccgcacgctctgctttatcagcattccggctgacgatcgcaattttcatcccctgccgtgaaagctcctttgccattgctgaacagagaacaccgctcccgcctgttatgacagcggttcttcctgataaacgttcatgaatcggtctcatcccttcacctttttctcatgagacgagaatgcatcccacagtccgctcaagtacataattcctaaggcacgatcatataaaccatagcccggccggcattgttcgccccagatatgacggccgtgatcaggccgtacatatcctttgtagccttggccgtgcaattcttttaccacaccggtaatatcaatggacccatcactggtaagatgcgaagtttccgtaaaatcaccgttatcgcagattttcacatttcgtatatgggcaaacggcgcagctccagcatagtgtttggcgatcttcaccatatcattggcgggatctgctcccatcgaacccgtgcacaacgtaatacagttggcgggtgaatctgaaatctctcgcagcttttcataacttttctcaccggtgataatacggggcaggccaaaaattgaccagggcggatcatccggatgaatggccatttgaatgccgtgttcctccgctacaggaaggatttcatgtaaaaaaaattctagattggcccaaagctgtttttcatcaaccgtttgataggcctcaaacagttccttgatccgggccattttctccggttcccacccgggaatcgtcaaatcagaagatttttcaaccgtgcggatgagttcctccggagggagactttccactttcgctttttcaaaaaacaaagcggttgacccatcttccagcgcgcggaacatatcggtacgcgtccagtcaaatatcggcatgaaattgtaacagatgactttcacgccgaattcggacagattgcgaatggtctgtttatagtgctcaatatattgtccgcgttcttcatgaccgagtttaatggcttcatgaacattcacgctttccacgacctctgtatgaaacccataggattgaatgaatctgacttccgcttcaatgtcctccttttcccatacttcgcccgcgggcttctggtgaagagcccagacgatgcctttgaccccgggaatttgtctgacatgttcaagagtcaccgtatcattaccttggccgtaccagcgaaacgtgatattcatgttacacccccgtatattcgttttttcggcagacgtattctttgctgagggatacggcagcttcatagccgcccttttgatatgcttttgtcaagtcgcttcccacaccgaccgcgaccgctccggcagagagccagtcattcatgctgtttaatgagatacccccggtcggcataatgcggacattcggcagagggccgttgaccgacttgataaatgaagggtcaaacgaattagcggggaacagctttaccacatcacatccggcttcgagcgccaaagccatatcagacacgctcatgcatcccggaagatacggtacgctgtactggttgcatagagacgctatctcttttacaaaatgagagctgacgataaatgaggcgcctgataaaatggcgtgtctcgccgtttctgtatccattacagaaccggctccaagaagaatatcttgatgccggagttccttaaagacatcttcgacttcaggagttgtgtatgtaagctcaatggcgctgatacctcctgaaatggccgcttttgaaacttcaagcgcctcttggctgttttgtccccttatgacagccaccacttgtgcatgcagaagtttttcgtaaatggcgtacttaggcagcattctcgctcctcctttaatcaaacgtaatgattgcttttcccgccttgcccgggtgctgttcgatcaactgaaatgcttgatggacgtcatctgctgaaaatgtatgtgtaataagaccgccgtgcgttaacaggcctttattcagtaagtctgtaatgtacggaaactgattcgtctgcaatcttgaaccggtgatcgtgacttccttttttgtgatcggaagctgagaaatgccggcagtcctctcatcaaaaccaagcacaaccacatgaccggccggagacaccgcgtcaatggacgtttcaaacgttgaggggagacagacggcatcaatgacgacattggcgccttcattttttgtccattcgttcacccgcaaaacgagatcttctttttgcgcgttgacggtaacgtccgcaccgtttttttcagcgaatgccaagcgttcatcattcaagtcggttatcatgacggaagcgcctttgaactttgccatttttaatatgcagattccgatcggtcccgctccctgaatcaaaacggtatcttccttctcgacacggcctctccaaacggcctgggcgccgatcgtatatggttctgccatgaccgcttcctcccagggcagatcgggggaaacggcatgcagctgcttttccggaaccacgatatattcccgcatcccgccatcttcatgaacgccgaacaccgaaagcgctttgcagacgttcggacgtcctttccggcaggcatagcatgttccgcaataagatatcggttcaaccactacgcggtcacccggcttgaaacgccgaacatgagaaccggtctttgcgacttcccctgtgacttcatgtccgattactctcggcaaagacgctaacggatttgtcccatgataaatatgcaaatctgatccgcaaattccgacccgcttcaccttgacaagaacatcatccgcgtggacaacagacggtttctcacattccgtcaccaccagatcaaatgctttccgtacttgaaccgctttcattttctcacccgctttttaagttgtgcttgctaccgttcaatcacagtctctttgtttacaaatgacagaacctcttctagatagggaagcccttcattgtcaccggaaactgtggtgacgagcgcaccgaccgcattggcaaactccagacgtttttccggttcaaaaccatgcagataactgtacaggtagccggcattaaagccgtcacccgctcctaccgtgtcaacaggcgcaacctggaaagcctctttgtgaacccacttatgatcatgatacagcgcagaacctgcttcaccgtcttttatgacaagctgactgattgaataggtctctgcaaaccgggctaatgcttcattttcccctatacctgtcagctgtttcatttcgtcccggcccgccagaagaatatcagtatacggaaagatttgatgaaatgccgcacgcgcctcctcgatcgtccacagcttcagcctgatattcggatcaaaagatacgggaatcccccttgctttggcgagggaaagcaccctttcagcaatttcaagatttttcttatcaagcgcgaggaacacaccggtaagatgaacgatgtgaatgccggcaaacatattctctgttatatcttccggtgcaagagtcagaattggtgaattgaaacgataataaaacgtcttgcctgaaccgtcatttctgatctctttgacatttaaagatgtaggaaagccttcaacataggagacgtcagtcacatcaattccttctcctttggcaaactgataaatcactctgccgaactcatccttccccagtctgctgacccactttgagtgcagattcaatctggcgcatgcaatcgcaaaattcagttcagctcctcctgcttttcgttcaaaatgggtaacaaaacgcaaaggtcctgtgcttgcgggatttaaggtgatcatcgcgtcaccgatcgtaaaaatgccataatcagaagccacatcaatactcctttccttgaagactaaatcggtttggtaaaccggtttagtaaaactttatatgaaaacccttacacacgcaagagaaaaatacaataaattcaaaaaaatctgttattggtaaaaataacccgatttttcacataaaaaaacccctcacaacaaaatgtaaggggttttttgaaaattatatgcatgtttcctcagttagcagtcttacgttcggggcttgtaccttcttcttccgcccatgtttcaatatgcttgagctccggggtgttctcggctttgaatacgggatcaagaccttttttgcgctgagcggcataatccttatagatcttgtaggctacattactcagcagtaagattgccactaagttaatgagagccaagagtcccataaacaagtttgccatgtcccagacgatctggaagtcagccaaacatccgtacaccaccatcactacaacgaatacgcggtaaatattaagccatgttttgcttgttttaataaattcaatattcgtttcaccatagtaatagttgccgacgacagagctgaatgcgaataaaaacatcgcaatcgcaataaatgtcggcgcccatccgccgaggtggtgctgcaatgcggtttgtgtcacttggatgccgtcgcctttaggcgtaaagctgtacaataaaatgataaaggcagtcgatgtacaaacaataaatgtatcaaaaaacacgccgagcgtctgaattaatccctgcttagccggatgcgaaacatgtgcagccgctgcggcattcggcgcgcttcccatacccgcttcgtttgaaaacaggccgcgctgcgcaccgataataatgatgcttcctaagcttccgccgacgatctgctcaagaccgaacgcatttttcacaatcgcagcaaacagctcaggtaccgctgtaatatttacaatcacgacatacagcgcgatcagaatatacatacccgccatgaccggaacgattaattgcgaaacggaaacaacacgtttcagaccgccgaatataatgaaagccgttaatacagctaaaatgattgcgataactgttttattcacatggaatgcttcgtcaaacgccacagaaatcgtatttgactgcacggcgttaaagataagtccgaaagaaacggtaatcaataccgcgaataaaataccgagccagcgggcgcccagtccctttgccatgtaatatgccggaccgccgcggaattcgtcaccggaacgcactttatacagctgcgccaaggtgctttccacaaagctggaagccataccgacaatcgctacgatccacatccaaaatactgcgccgggaccgcctgttgcaatcgccagcgcgacgccggtcaagtttccggttccgacacgagaagcggccgagataaagaatgcctgcattgaagacactcctttatttccttgcggcttctccccgacgattctgaacatttcaataaagtattggaattgaataaagcgaaaacggaacgtaaagtacaatccgatcccgactaaaatataaacaagatacttccaaataaaatcatttggaacatttatgatttcactgatgaaagcctccatgtttaacctcccttttacatatcttttactgtcatttttgctgcatatgttagatcttttaacacaacgagtattattatatcacaacaacagtggttgagaagtttttttaagaaaatgtttcggtttcttcatacgtcttttgctgtcatgccccgttttttatcttacagcccgaaaaatgttgtcacgtcataaggaatgcgtgcatatcataacaaataggtctttaagaaaaaagagatgaaaagatggatggaatggtatatacttaaccaggataataattttttaaatttaataaatatgtttactttacatttaaattagggtattataataaaaatattcagacttatgaaggggggagaacatttgaaaaaaatcttgtttttaaaagcttctattttatttttagcgattgcaagctttcatttgctctccattccccatgcgttcgatactgctcatcattttaaagcggtagccgaccagcaggaaatgcacgaaatgaaggccggccaaaatgctgatgatgagaaaaaatcgctgacgggctcatatatcttgacggcgctttttgccgcttctgtctcactgatcgtgatatcagacaggagacgccccgcttcccggagaagacagcgaaagaaaagctttttaatcgctaaattttatcagtcctcgtatttcgatgagcttcatgttcaacatcgcctatctatgtaacataagccgtgcgggagataagaaagcagggttttcacaaatgaggaggttgttaaacatgttgtttatcttacgaatggtgattttagggttgttttcattcactgcactgaatttatttgtatggcagggaatcgaagtcattcacgctatcactgacttattcggcagccatgaaagctaaatagtaaaacctccgctcaatgagcggaggtttttttattttatttttactcttaaacatcagacgcggggatacgccatacatctgttaccggccctgtctcatcttcatcggtaaagaaggaaccgttgctgtatcggtcattcgcccgcaaggacttcacggcgatttcgattctctcgcctttttctgtttccgcagcgatcatgtcggctaaagcgcacgcgaatacgccgactgcgcgatgcgggttctttttaagctcacgcagcatgatgacaccgcgcttcgccctggatgttttttcgaattcagataggttcatccgcttgattgctccccgctgtgtgacaaggacaagcgaatctgtctcatgcagaatttgtcctgatacgacggtatcaccgtcttttacatttatgccctttacgccggccgcacgggcaccgactacatttacttcatcttcaccgaaccataaaccgtacccgaggcgggtggcgataaacagctggcagccgccgtctgtgacatgaacatcaatcagctcgtcgtcccctttaaggttaagggcaacaagcgctttcgagtaacgctgcgctttgtaatgcgtcatttcagttcttttcaccatgccgtttttcgtcataaacaataaatatgatgatggatcaaattcttttaccggtatagctttcacgatggtttcatcacggtcaatcgtgatgatgttcgttacgtgctgccccatgtctttccacctgatatcgggaagctggtgaaccggacaataaacatagcttcccttattggtaaagagcaggagaacatccgttgtattcatttcaaattggtgaatcagcctgtcagtatccttcataccgaaatcctggccgttagaagcggcaaatgaccgctggcttgttcgttttacatagccgtcttttgtgactgtcacatatacgtcctcagaggcaaccatcacttcaagattgattttaatttcctcaatcttttcttcaatgacagaccgtctgctgtcagcataggtctttttcaattttttcaggctgcttgtaatgacttttaacagctttttatcatgacttaaaatggcttcgagctcctgaattttcttgctgagctcttccgcttcctcttttagcgccgtaatatccgtgtttgtcagacgatacagctgcaaggatacgatcgcttcggcctgcggctccgtaaatgtgaatttagacattaagttttgtttcgcatctttcttgtcgctgcttgcccggatgacggctatgacctcatctaacacagacagtgccttcatcagtccttcaacgatgtggtgccgctcttttgctttttgcaattcaaagacggagcggtttgtcaccacttccttctgatgggaaatatacgcatccaggatggccgtaagactcatcagcatcggccggcggttatgtatggcgaccatattaaagttataagttgtctgcagatcagtgtttttatataagaaattcaaaatgccttttgcatcggcttctttctttaactcaacgaccacccgaagccccgtgcggtcagtttcatcccggacttcagaaatgccttcgacttttttgtctatgcggtattcgtccattttctttacgagattggctttgtttacttcaaacggaatttctgtaatgacgatctgctcccgtccgcctcttacggattccacttcagccttgccgcggataataattttgccttttccggtttcataagccttccgaatgccgtcgactccttgaattatgcctcctgtcggaaagtcaggccctttaatcacctgcatcaagtcatcgacggtgcaatccggagattcaatccgtttaatgacggcatcaatgacctcacccagatgatgagggggaatatcagtcgcatagcccgctgaaatcccggttgatccgttgacaagcaagttagggaacatggcgggcaaaacaaccggttctttactagtgtcatcaaagttcggaacgaattcaaccgtatttttatcaatgtcacgcaaaagctctgacgcgatagaagataatctcgcttccgtataacgcatggcagccggcggatcaccgtcaatgcttccattgttgccgtgcatctcaatcagcacattccgcactttccaatcctggctcatccgcaccatcgcttcataaacggagctgtcaccgtgcggatgataattaccgataacgtttccgaccgtttttgccgctttacggaaatttttatcgaatgtatttccgtctgcgtgcatggcgtataaaattctccgctgcaccggctttaaaccgtcacgagcgtcgggcagcgccctgtcttgaataatgtatttactgtagcgtccgaaacggtcgccgattacttcttctaacggtaaatcatgaaataattctggctgtgccactattaaacctcctcagcgaccgacaagttttcattttctaaaatattgctttcctcatctaatccgaaggcaacattcttttcaatccattttcttctcggttctactttgtctcccattaatgtcgttacacggcgctctacccgtgccgcatcgtcgatcttgactctgacgagcgttcgcgattcgggattcatcgtcgtttcccagagctggtctgcgttcatttctcccagacctttatagcgctggatggtataccctttgccgactttctttaaaacgccgtccatttcttcgtcggaccaagcatattcaataatctctttcttaccgcttcctttgctcactttgtaaagaggcggaagggcgatgaagacttttccgtgctcgattaaaggtttcatatagcggtagaaaaatgttaacagcaagacttgaatgtgcgcgccgtcggtatccgcgtccgtcatgatgatgatcttgtcataattgatgtcgtctatctcaaaatctgcgccgacaccgccgccgatcgcatgaataatcgtattgatttcttcatttttgaagatgtctgcaagctttgctttctctgtgttgatgacctttccgcgaaggggcagcacggcttggaatttccggtctcttccctgttttgcagaacctcccgcagagtctccctccaccagatacaattcattcttcgccggatttctggaaccggccggtgtgagttttccgctcagcgtcgcttctgattttttgcgctttttgccgcttctcgcttcttctctcgctttacgggccgcttcacgggcctggcttgctttaatcgcttttttgacaagcagggttgctgtatcgcggttttcttccaggaaataagccagattctcggaaatgacggcatccgcggcggatctcgcctcacttgtgccaagcttccctttcgtctggccttcaaattgcagcagttcctccgggatacgcacggaaatgattgcggacaaaccttccctgatatcggcgccttcaaggttcttgtctttctcttttaaaagggcgacctttcgcgcatactcgttaaacgctcttgtcattgccgttttggctcctgattcgtgggtgccgccgtcctttgttctgacgttattaacgaatgacagcatattttctgaatacccgtcattaaactgaaacgcgaaatcgacttcaatgtcatgatgctcgccttcaaaggaaaccacttcgcataaagcgtctttttcctcgtttagataagcgacaaatgcttcaattccgttctcataataaaatacttcttttacgccgttccgttcatcaattaattctattttcaaaccttttaacaagaaagccgattcgcgcagacgttctgacagcgtgtcaaaattataaaccgttgcgctgaacattgacggatcaggtttaaaatgggtaagcgttcccgtttttttggtcgttccgattttttcaagtgaagtcacgggcttgccgccgttttcaaaccgctgtttatacatatatccgtcacgctcaatagtaaccgtcagccactctgataatgcgtttacgacagatgcgccgacaccatgcagaccgccgcttgttttatagccgccctgtccgaatttccccccggcatgcagcacggtgaaaataacttccggcgtcggctttccgagcttatgcatcccggtcggcattccgcgtcctctgtcctgtacggagatgctgttgtccttatgtatcgttacgataatatgatctccgtagccggcaagaacttcatcgacggaattgtcgacgatctcatataccagatggtgcaggccgcgtgcgtccgtcgaaccgatgtacattcccggtcgttttctgacggcttccaggccttcaagcacctgtatggcatcttcgttgtaatcaaattgctgttttctagccaaacgtacaaacccctttcaaaaaacctgctcttaatcattttcttttttaaatgttttcatgtctttgtttttcagtatgcgcaagcttcggtccaattctcctcggactcacaattataaccaatatgcttgatttcgcaacatatttaagcgaatggctcgttttttaggccgcaagacatacattcgaacggcttttcatctttctggtgcccttttcagcgaataagaacatgagttcgctttctattatatagctttatgccggccatcgcaaacagactgtaaacccctgtataaaggggtttctaaaaaagctgttcatgctttattgtatctgtttcatcatcatacgcaaagagtattctttcaataaaaaagcaaaaacccctgatttgccaaggatttttgctttttttgttcctattttataacagcgcgggcgacttttatacataaatccataacagccgtccgtcctttgtctgtaatcatgcgatacgcttcttcatttgcaaggccctgctgcgcccaaaaaacgggagcgtccgtctgtaaaaattcttcagcgacgccgggaagctgctcagagcgtctgaacacattcacgatatcaatcggtccctccacgtcttttaatgaagcgacggctttaacgccaagcgcctcatcaatcgttggattgacgggaataatttcatacccttcatcctgcatcgctttggaaaccatgtaagaagtccggtcgggacggtctgacagcccgacgactgcgatccgtttgctacggtccagaatttctttaatctctgattttgaaggattttgcatctttaccatctccttttgatatattgtacatgaccgcttcgccggaatcaaaaaaagcgctttgtcagcttaattctcaaaaaacttgtcatcagacggtaacaactcgtgttaaaatagagtgaagggacattgaaaaggagaaatgtagatgttgattgctttattgattattttggcctatgtaataggcagcatcccgtcaggtttaatcgtaggcaaacttgcgaaagggatcgatattagagaacacggaagcggcaatttgggcgctacaaatgcttttcgcacgcttggcgttaaagcgggatctgttgtcatcgcagccgatattttaaaaggcaccttggccgcggcgctcccatatttactgcacgtccccattcatcctcttctcgcaggggtggcagcagtaatcggccatgtattccccgtgttcgcaaagtttaagggaggcaaagccgtagccacatcagggggcgtcctgctgttttatgctccgctgttattcgttacgatggttgcagtatttttcgtatttttattccttacgaaatttgtttctctgtcttcaatgttaacagggatttatacgattatttactgtctgtttgtaaaagacccttatttattagtcgtagtgacgctcttgaccgcgtttgttatctacagacacagggcaaacatcaaacggattataaacaaaacagaaccgaagatcaaatggttttgatgaaacttcaattttgacatcaaaatgccatatgcgtttataatagagataatttctttatatgagaaacaaaaagggagtgttccggatgaacatgaaagtaacgaaaggcgcgctggattggtacaaagaagagctcgatctggaaacaggcgaccatgtccgtttctttgtccgttacgggggatgcagcaacgttcagaaaggcttttctctcggcattttaaaagaccggccgatgaacatcggcaccagcacggaagttgaaggcattaccttttttattgaagaaagcgacttatggtactttgataatcacgatttgtcagtcacatattcagatcaggcagaagagccggtatttgattacgtgtaagaaaaaaagaacgcagcggatgcgttcttttttttacagcctgaaccttttgagatgatcagtcagatgttctttttctaatatgcttctttgcgtatcaccgagcaggtcaaagtggggaaattcatttttatggtgaatccactccggcttcagcccgtactccgctccccatctgatcagtttattgagatcgcttgaaccggccttcgtcacggtcttagcctccggaaagcggtcgtccagccagtaatgcgttaaaaaagcgattttcccttccgatacatcccgcttccatctttccagttccctgcgcgtaattccaaatgccataactgcagccgctccttatttttttgccttttcgtaagcggcatgccaatcaggaaaagccttgcgaaactgaatcggtttgaaactctctttatcaacgcatatatgagaggatgtcgccttgatggcaagttcttgatccggattatagatgtggtagccgtaaacggttttaaatccgttatattcttcaatccaagtatgtacgacagccgtttctccgtagcggagcggctttttataagaaatgctgatatccaatacaggggacagcactcctctgtcttccatatccttgtaaaggaatccgagttccttaatcagcgccgttctgccaacctccatccagactaagtaattggcatgatagacgatgcccatttgatctgtttccgcataacgcacttctatttctttttttgacacatgcaacgttctctgctcccttattatcagattagccccattttatcacaacgagccggaaagagaaaaaaaccaggtttccctggtttttattatgattgatagccgttttctcttgcagccgattcatcctggatttcactgcggaacgattcaatgctttcattgcgtctggcattcttctcttgaatgcgctgtttttcctcatctgtcgcaaattccattgattctttggcttcttctatattttcaattgtattctggaccatatcctgcagcttttcaacgttatcggaacggtcatccggatttggtttttgatcattgtttgtcataatgtctgctctcctttgttgatgttattcgcctttcgtctgcatgacaatcggatgtccgtttgacttgtcatgaaacttttcccctttgttgcgtttatatttaacgggttttgtccctaagtggctcggagcgtattgcggctggccgtctttcttgtttatgcccatgttcatccctccttaagagtatattttgcaaaaggaggtgcaaacatgactgcaaattaaaggttatttttgtttgaaccgctgctccagcttttcttcaagctgattcaaatattccgtattggtcatcagctcacgtttattttccataaccaattcatgaaaagaacgttttcgcatttttttcaatcttctcacctccgtgttttcattcattttttccaatttttcaaaacctaagtccttcacaataaaaaaactgaacctctatttgagatccagtttttctttcatttctttttttgtcatcgtgcctacgcgaatgtgctgaatggttcctttttcgtctaatatgtatgttgtcggataagaaagcacgttgaaatctccgttaattccgcttttgtcaatcagaataggaaaggtcagctgataatgatcagcaaatgatttcacagcctgtatatttttttcagaggacgtaaaattaacggctgctaccgcaatatcaggatattctttctgcagctcctgcatatcaggcatttccattcggcacggcttacaccacgtcgcccagaaattgaggagcactttttttcctttataatcagaaagggagatactttttcctgacaatgtatcaagtgtaaagtcaggggctttcatcccttcttctgtcccttctttcggacttttttgtacagaataaatgttccagcccgcatacactaacaacccgataagtaacattccgcccagccatttcgcaagcatctcaaggcctcccgcataaaaagagagaaagcagactgctttctctcctttgttcattctgctactgtttcattttatcgcgaagcaccatttgtaaaatgccgccgtggcgatagtaatcaatttccacttcactgtcaaaacggacaacaacttcaaatgtttttaccgtaccgtcttcactgattgctctgacagtcagcaagtcgcgcggacgtacagattcatcaacatccacctcgatgacttccttaccggttaagccgagtgtatccgcgttttcaccctgtttgaactggagcggcagcacacccatgaagacgaggttgcttctgtgaattctttcaaagctttcggcaatgactgttctgatgccgagcaggtttgttccttttgcagcccagtcacgtgaagagcccattccgtaatcttttccggccaggacgacaagacccgttttatcatctttataccgcatgcaggcatcataaatagatgtcacttccccggtaggccaatgtgttgtgtatccgccttctgtacccggtgcgatttggtttttaatgcggatattggcgaatgttcctctcatcatgacttcatggtttccgcggcgtgagccgtaagagttaaagtcacgaggagaaacgcctttttcctgcaggtatttgcccgccggtgtgtcttttccgatcgctccggccggagaaatgtggtcagtcgtcacggaatcgccgaatttgccgacaacgcgaagtcctcttaaaggctcaacttttcccggctctacagacatttcctcaaagaacggcgggttttgaatgtaagtggaatcctgatcccacttgtacagcgcttcatccgtcgtttcgatttcgttccagcgctggttgtcgtcaaataccgtttcatactctttgcggaataattccggcgtaacagtctgtttgacgagagaattgatttcatccatggacggccagatgtcatcgaaataaacattttgtccgtcatttccgacaccgatcggatccgttttcaggttgatattcacagtgcctgctaatgcgtatgccacaacaagcggaggtgacgcaaggtagtttcctttgacaagcggatggatccggccttcaaagtttctgttacccgacaagacagaagtgatcaagagatcatttttagcaaccgcttcttcaatctctggagaaagcgggccggagttcccgatacatgtcgtacagccataccctacgaggttaaagccgagctccttcatgtaaggaagcaggcctgagttgactaagtatccagtaacaaccttagaccccggtgcaagtgatgttttaacataattcggtactttcaagcctaattctaccgcttttttggctaccaatccggcaccgattaatacataagggtttgatgtattcgtacagcttgtaatagcggcgattgcaatcgctcctgttttcataaccgcatcttcaccgctgttaagtttaaatgaaatttctttgttctcttcagcagtatccgctccgaatccttggttgccggccgggctgacaagatgttttttaaacgtttcctgcataacggaaagcgggattaaatcctgcggacgtttcggtcctgaaaggttcgcttcgatttttgacagatcaatttccacaacgtctgtaaaaatcggctcttccgcgtcaggcgtatagaataaaccgttgttgcggcagtatgcttccacaatatcgatctgctcttcttcacgaccggtcagacgcaggtaagaaagtgcttcctcgtcaaccgggaagaatccgcaagtcgctccgtattccggcgccatattggcaatagtcgcacgatccgcaagcggaagctcagcaacaccaggaccgaagaattcaacaaatttattgactacgcctttttcgcgcagcacttgagtgactttcagcgccaagtcagtcgccgtcgttccgttaggcaattttccgacaagtttcgcgccgatgacctcaggaacagggaaatatgaaggctggccgagcattcccgcttccgcctcaataccgccgacaccccagccgaggacgccgattccgttaatcattgttgtatgggaatctgttcccaccaatgtatcaggatatgtcacaagttctccgtcttcctctttcgtatgaacgacacttgccaaaaactcaaggtttacctggtgaacgatacctgttgcaggcggaacggcctgataattgttaaacgctttctttgcccagcttaaaaatttataacgttctgcatttctttcgaattctaagtccatattaatggctaacgcgtcttccgtaccggctttgtcgacttgtacggagtggtcaatgaccaggtcaaccggaatttcaggattgattttatcagggtctccgccgacagaggccatggcttttcttaaagatgccaggtcaactacggccggaacgcctgtaaagtcctgtagaataacccgtgacggtttaaacggcacatcgatatcttttaattcagcagtaccccatcttgctaaattttcaacatgttcttttgtaatgacgcgtccgtctacctgacgcaaaacggattccaaaagaaccttaatagaataaggaagttttgaaacattgccgacccctgcgtcttccaatgcttttaatgaatagtagttgtatgttttcccatttgaagaaaatgtttttcttgcttggaaaacgtcttgtgttgcgactttttgctgatttgtcattctccaaaatcccccttcaatgatcaagatcgttctttagatgaatgttcacattccatcacaattttctcacaatttcatcttagtataaaatcatacataagtaaatatcaatgtttttattaaatacaataagatcgtcttatcagcatgattttcggtaaattttgtccgattttccgcctcatacaacgggctgtaaagagccatattaatgttgaggtgatgatcatggtaaaacggaaagccaatcatgtcattaacggcatgaatgatgcgaaaagccaaggcaaaggcgcgggttatatagaaaatgaccagctcgtcctgacggaagaagaacggcagaacaataaaaaaagaaaaacaaaccaatagccggaacaccttaaaaaggaggctttaacatgacaaataaaaatacgagtaaagatatgcataaaaatgctccgaagggccataaccccggccagccggaaccgctgagcggaagcaaaaaagtgaaaaaccgcaaccatacaagacaaaaacataatacaagccacgatatgtaaaacagaccccgtgtctgtttttttgtgccattcacccattcaaagcttctgcatacgttatagcaaggctttttaatatggaggaatgcttccatgaatcactcaaaaaacgctgaagaatttgatgatacggaagaatggctgcggcagttttacgaggacccgtatgcttggtatgacgagacgctgccgatcgatctatatgaaacaagccgtcaatatatcattgaagccgacctgacggcgctgaagcaggtgcaagcgataaccgtcactctttcgggaaatgagtttatgctctctgttaaaacgcttgaacggacgttaaacaaacaaatgatgcttcctttttatctgaatgacaaacatattttcactgatttcaccaaccatattctgaccgtctccatgaacaaggagccaaatgagactcctgcctctttttcctttcaatttcctctataacataaaaaagccgctttcatccctcaatggaagcggctttttttgtccggtcatatcagtcatataccctcaaagtgaatctcccatggccaaatagcagaatcactatacgatagaatatgttctaccaaccggaatgactggacatctatcattttttctattctttttttctattctttttttcatgtgttcttctattctgtcttcgtttacaatatggttaaagtaaggaggagatagaacaatgctggaaggctggtttatgtggtttattttattttgggtcatcgtgatgatcggattgctgtctatcggcgggttttttatgtttcgaaaatttttaaaacgcttaccgaaagaagacggccggtcagaactggattggcaggactattatattgaaaaaagcaggcacttatggaatgagggtgacaaggcgtttttggatgaactggtcgcccccgtaccggagctctttcgggatgtagccaaagcgaaaatcgccggaaaaatcggtgaactttccttagcggaggaagctgaacaaataaaccgtgatttaatcatcaggggttacatactggccacccctaagcgtgatcatcaatttttaaaaaagcatctccgtgaaaaacagattgatcttactccttatcaagccctgctcaaataaaaaacctttccggcggacggaaaggttttaattcatctgaatatcagcggtcttcagttcattcgaaagtttgcggtaagacaaaaacatcgcgatgcgccacgggacaatcattccgaaagccagaatccaaaacattccgcttaaagctccgtaatcaatcgtcgtgctcaaaatggatttcatagcgattctgataaccaagagaccaatcaggataaacacaaacgcttttgaccgttttaaatagatttcattatttttaatctcaaatttagatgttttaatcagaaaaatagagaagatcacgcccagcgtaatggcctccaaaaattcttcgcccgtcactctgaaaatcggaaaaaggaacataagcgctcccgtactcatgaaaatcggcgggagaattatttttttaggtgaagcgggcttgtcggaggatttaatcctgacgatcatcacggaaattgccatggccgctgcaataacggatgaaattataatcatcatctttatcattcctttgcttgcacggagtttaatactatatactatactccaaaaacataaaaaaaaccaatttgaaaagagaacacgtttacgttcccgttacccggccaacggcctccagcactttagatgcttcaaacggtttaacgataaagtctttagcgcctaattcaatcgcttccagaacgatccgctgctgccgcatggcggtgcacatgatgatccgggctttcgggtcaaaagctaaaatatcctgcagagcctgtataccgtttttgaccggcatggtaatatccattgtcaccaggtcgggacggattttttgatatactgacagggcttcctcaccgtcagccgcttccccggccactgtgtaattcgccgattccagaatctctctgattttcaccctcatgaacttggcgtcatctacaactaaaactcgtgtcatattcccctccacatatttaacattaactagtcttattgtaccaaaaacaaaagggtatataatagttcaaaagttattaatccgttacagaccggtaaatcctccgaaaagatttgacagaacgatcagaatgtagctcatccagttaaaaaacagcataactccgatcagaatcataagaatgccgccgattttcatgataagcagctgatgcttgcgaatccaattcattctggtaataaaaaatgaaagaacaagaaaaggaatcgcaaacccgagaacatataaaaacatatacggcactgctgaagaaggatttgtattggccagcgaaaacacggctcctaaaataggcccgctgcacggcgaccagccggctgcaaatgcaagaccgatcagaaccgaaccgataaacccctccggacggcgcttaaagtgaatgcgccgctctttcatcatgaatttcggctgaaacacaccggcagtaatcagcccgaaaaggatcagcatgatagcgccaaactggcggatcgcttcatgatattgggtaaaaaaactgccgataaaagaagttccatatcccaatgcgataaaaatcacggagaaaccaagcaaaaaacaaagtgtatgcacgaggccacgcttttgcagcatcaccttttctgttttcacctcgtccatactgacaccagttatgtaagataaaaaggcggggtacaacggcagacagcatggagaaatgaaagacagaaatccggccccaaacgtcaaaaagtaattaaaactcacgatgacacactcccttcgagttatgacaaaatcatttcatttttttaacactttcccgagaaggattactttttatagaaaaagcttatataatttaatttgacatcgagatattatactccttcttatttgaaaaacagtataaatgtggatataataatagcgactcaggtgaaagatttatgtatgaaaggatatatccctgtgattagagagcatctattaaatgaaattgaaaaaaaacgggcagagctgcttaaaatcgtcatgacaaacggaatgacatcaaacattacgatagaactcagccaggagcttgaccaccttctcatacaatatcaaaaagaactgcacaccggcagttggggtgaaacatgacgccaaaataaaaaaccctctccgggttttttatttttataaccatgtatctctatatcataatctgtacgtattatttcgcttgattattcatggctttcatcatttgattaattttcttttgagaaggtttcattcccatttgcatcatcatcatgcgtagcatttgttcattaataggcggattctttttcaaatagctcatcatatatttacgagcaataaaaaacccgagtgcaacacctatgagcaatgcgacaacgcccactaggatgccaacccataaagtcattttatttcctccttcatgttgtctagtttaaagtgtactaaaccaaaggctattatacaacatttacatctctttttcctcgtttttagacaaaatttctttctctgaccggatttaaccacccgtagcgccgtgtcttgaaatccattgcaagaaaacaggggctgattttacgcagaatctcaaagaaaatcgtttccgcctcataatctcccgaagccgcaatctcaattaaactgtctttcatcatgaaggtggcgcggcccttttctccgggcagtgtaagccggtaaatggaatccaaacggctgtaactcattcggtttaaatgcagctggagacgctgatgcatatgtatcaccggaatcggttccgttatatattgaacttgcttttctgtcatttgatattcctggggtgtcaggtctgtccaatgatagtctcgaaacaactcaaacatagccgtttcccgcccgaagtagtggttcgcaaactcatcctttatcaggtgcgtatagtaatgacgttccatttcctcatccccttttacagcgcttcgttattgctttctattatacaaaaggagaaaagaaagaattgtctattactgttacgccgccccttctatttttgtcgcataaacaggaaaaagaggatgatttgactcatcctcttttgtctcgttatttgtttaaaagttttttcacgcggtcaaccacgttttctgcagtaaacccgtattctttcataattgtttctcccggagctgaagcaccgaaacggtcaattgcgagaacgtctccttcaagaccggtaaatttgccccatccgaagcttgaacccatttcgatcgcaagacgtttcgtcacattcggaggaagcacgctgtttttgtactcggccgattgtttttcaaagcggtcccagctcggcatgctgactacagatacgtgaatgttttcttcagccagtttcgcttgagcttcgatcgcaagtccgacttcagaacctgtcgctaaaagaagagcggccggtgattccgtttgggcttttgaaacgatataagcccctttttccacgcccgcatacgcttcttcagcctgctgatcaatcgtcggcaggttttggcgtgtcaatacaagagctgtcggatgatcttggctttgaacggcaaccttccatgcagctgcggtttcatttccgtcagcaggtctgatcacagaaaggttaggaagtgcgcgtaaagaagcaagctgctcaatcggttcgtgagtcggcccgtcctctcctacggcaatactgtcatgcgtgaatacataagtgacgggaagacccatcaatgacgccagacgaatggcaggtcttaaataatcagagaacacaaagaatgtgccgccgaatacgcggaggccgccgtgaagcgccattccgtttaatgcagcgcccatcgcaaattcacggacaccgaaccagaagtttttcccggcgtagtctttggccgtgaagtctcctccatttttgattgtcgttttatttgaacccgcaaggtcagcagatcccccgacaaagaaaggaattttcttggcgatcccgttcagcacctcacctgaagatgcgcgggaagcaaggctgctgcctttttcataaacgggaacttcctgatcccagtctttaggaagctcgcctttcatgccgagtgacagctgttcagcaagctcaggatatttttctttataagccgcgaacagttcattccattcctgttcttttttcgagccggcttcttttacagcttgattgaaatgcccgtatacttcttccggaacataaaaatcttcttcaaacgtccaagcatacgcttcttttgtcagcttgctctcttctagtcctaacggagcgccgtgaacgccggatgtgcccgcacggtttggagagccgaaaccgatcgtggttttcacttcaatcaaagtcggttttttatcattctggcgcgctttttcaattgcagccgtcaattcagcgatgttgtttccgtcctcaacataaagaacttcccagttcattgcttcaaaacgctgctttacattttcagagaaagaacggtctaaatcgccgtctaaggaaatgtcattagaatcgtataatacgatcaggcggcctaattcaagatggcctgcaagagaagcggcttcggaagaaatgccttccattaaatcaccgtctccgcaaatactgtatgtataatgatcaactacgttgaaagaatcacggttatatgtctcagccagatggcgttctgcaattgccattcccactgccattgcaataccctgtccaagcggcccggtcgttgcgtctactccggctgtgtgcccgaactccggatgtcccggtgttttgcttccccattgacggaactgtttcaagtcttcaatgctgaggtcatatccgcttaaatgcagcatgctgtataaaagcattgaaccgtggcctgctgataaaacaaagcggtcgcggttaaaccagcccggattctgcgggtttacattcataaatttcgtccacagcgtatatgccatcggagcggctcccatcggcatgcccggatgtccggaattcgctttttcaattgcgtctatagatagtgtacgaatggtggcaactgatttcttttcaattgtatccattataatccccttccttattgttgtaccttttcatcataaagcgatgctgactttttctcaactctttcagcttaaatttgagataaacttgttgaaaattgtcgtaaagcacagcctgatattagtatatacgaaaaaagaatacgtattgccgtattctttctgtttaatgaagattatttttctgttgttctctttttaatttttcaggggtgacatcgttgccttccggatcaatcacttttacgctctttaacgtatttttcattgaggagcggaatcctttcaaatactcctggcgaagcttttgctgttcagctttttcctcatccgttatcgtgtttgatttagctttttgagccaattcgttaattcttgcgattttttctttagaaatcataataagctcctttggtgcgtgttgattatatactactaaaacgcagtcttttttacaactgatgcgcgtcagctgccttctgtgtctgcggtatattcctgaaaccgccggtgaaccgtggctttggacacatcgtagccgaatccccttaaggtcgctgcgatttctgcaaaggtaagcttgttggctctcagcctgataatttccgaaaccggaacctcttttttttcttttccgctgttttcatgtctgtttttcagattccgttcaggtttgtagccgtttttcacggctcttttcattccccgccggattttcatattgtgaattttcctttgatattcctcaacaatactgacgatttcgagtaccatcgaatcagcttcggaaagctccagttcacctttatgagccgtcgtatatatttttacgttctccctgtaaatgcaatgcaaaagcgcaatcttggcgtttcctcttcctaatctcgtttcgtcctgcaccaatatcgcgtcaatatgtgattttttaatttcatcaagcatttcaaatactccgtcgcggtccatttcgtaaccgctggctttctcagaaatgactttcacgacttccatgccgtttgcagcagcaatctcactgagctcctcttcctgtctttttaatgatgtttgctgctgttctttgtttgtgcttacgcgggcataaatgagcgccttcatttctctctttcctctctaattgacaatggccagctgatatacggccggatgctttttcttaaccggaagaataagttcgtctccgggctttatatcagcagtttggagatgattattctccgtcacccactcaatgaaatcttctttattaatgtgtttcttttctgctacatgatccgcaagtgaccagagtgtatcgccgtcctgaacctttattttaacatattggctgagggactgatcatttcccgcacatgagacaagtaaaatagcggcacttaaaatcgcagtaaacagtccgacaaatataatagattctttcgccatgtaaacaacctccgataagaatgtttgttcgctttttatacctttcagtatatacgaacaaacgtttctgtcaatcgtttttttcgaacctatgtttgtactgtcaggaaaatcatgctataatctacttaaaatcgacgttttgaggtgcgaaatatgacgaagctatcaaaaaggcagcttgatatcctgcgttttattaaagaagaggtaaaaacgaaaggatatccgccttctgtaagagagataggagaagcagtaggactggcttccagttcaaccgtgcacggccatttggcgcggctggagacaaaaggcctgatcagacgggacccaactaaaccgagggcgattgaggtattggatgaagaagaagtccacattccgaaaagccaggtcgtaaacgttccggtcatcgggaaagtgacggcgggtattccgattacggctgttgaaaatatcgacgagtattttccgcttcctgaccggatggttcctccgggcgaacatgtctttatgttagaaatcatgggagaaagtatgatcgacgccggtatttttgacaaagattacgtcattgtcaaacagcagaacacggccaataacggagaaatcgtcgtagctatgaccgaagatgatgaagcgacggtcaagcgcttctataaagaagacaattatgtacggctgcagccggaaaatccgacgatggagccgattatcctgcaaaacgtaagcattttggggaaagttatcggcgtattcagagccgtacattaattctattaaacttcatttatcgtaaaaaaccccttacagaggggtttttttttgcataaaaaaagcagattcgccctggcttaagaaacgaatctgctaaggaggaaaaacttacattcttattatccgacatcgcacttttgaagtcaactaataatgtttccctcgagaaacttttcattcatttttcaactttgtatatttgtgcgtgatgaatttacttttgtttatgttttctttggacgggtgcattaaaatttatgtatgaatatttagtacatagtacaataagttatatttaaatataaaaaaacccgctgcctttagcgagtatctattttcaatcaaaatgataatattctacaccgtataaccctttaatatagacgggcccacagacgtttgaagaactttcaaccagaatcctgtatttgtgatacggatcaattgattttttatcctgggcactgaggtttaaccagctgccgctgtagtttttagaacttaatgtataaaaattcccgttcagcgccatccgctggagtttcatgcttaaaccgcacgaagagttgttcattatggtgaacttatatcctaaaaagtaatcgtcggcagctacagcccccggattttcaatatgaaactcttttgcatttccctccaaagtgaagcttgtttttgatccgaattcagtggtagccgcttcagctgagtgtattccgctaaaacataataaaaaaacagcaatacatatccagtattttttcatttgcatccccctttttacatattttaacttgtgaatcctgtgatgtctattcacattttattaaaacgtatactttataaccactatataccagtttaaaaatttgcggattgcttacaatgaagactaaacgaaataacgaaggtggttcaaatgaaacacgtaattgctttcgcttctaaaacggcgctcacacttgctttactgtacattgttctggatcttatgtaccaagtaacctttttaaacgttctgtttattacagtgatcttaagtttaatcacttattttgcgggtgattgcatgattctgccgagaacaagcaatttcacagccgttgcagctgatttcggaatttcattcattatattatggatattccttatgaacattggcggatttaatgtctctcctgccgcggcatcggttatctctgcactttgcatttctgtttttgaggcattttttcaccggtatttgcagcaatatgtacttcccgaagattatcaggacacaacagagacggatagcacgctatggagctatcaaaccgaggcgtctgaagaattagtgccggaaaaagaccctcaggaaaaaacataaaaaggaggcaatcgcctccttctctttttatttttgcttctgatcgtccagcggcagctgcagcagtgagtctgtgcctgtcgctttcggtgtttttccgtcccatttttcaatccatttatatttgatcatctcatcggacattgatttctttatgatttcgttataatcagcgatcccttccgcttcaatttttttctttttcgcttcggcttcggctattttaatttcagtttgtgtccgttcaagttcctgtgaagacttcacccttgcatcgatggcttcctgtgtggctttatccggcttcggtacgccaagtgtcagatcatcaattaaaaatccaagactcttcatatcatcagcaaatctcttttgaacatcggcagcggcttctgcagatttttgcccgtatgtgtcaataaccgagtatttgctgattgattttcgcgccgcatcccacagccttgtttttaaatatgtattttcgattgtttcaacgtctaccgcgccgaatttgttaaacagatcgactactttgtcaggctgcacgacatagttgtaagcgatatccatttctatatttttaccgtctgaggttgccacttttatattttcattattcactgtctgcatacgcaccggatattccgttactttattaaataaaccgactaagtgccagccttggtccaatgtgtcggattttaccccgccattcggtgagtatacaaccccgacataaccgttcggtattttttcaatgaatagtgacgctgtaacgcccgcaattaaaagggctgcacctataatcacaccgccgagaattttttttgtgtttccgcgcttattttcgctcatgctgatcttcttcctcccatgactttttgaattttttggctccgcttcccacttgtttaaagattggactaagcatcagccataaaccgaatccgatgatgacaagaagaatgatagacccgatcatcactttcatttgcccacctcttttctttcatcctgtcaattatgtatacgatcttaagaacttaaagtttcataaatttcaaaagaaaaagccccgccgacaaaataggcgtgcttattaataattgtcactgataaaatcagaaaccgtttttgtgaattgataaaaggtcccattttgtgtggatgctctgcttttcagcgtaaaagtgtcaaatagtgattttctgaacccggtgctcatttcaatttgaatactcaatccggatgaagattgattggcaaggttgttcggactgacgcctgcatatttatcatttatgccaagaagaacggcaggatacccgtgccgtttcagcacatcggtcaaaagttcggcccgttctctgtctgtaccgccgatttttatctttttatcatcactgccgtaaccgtgcaatgaaatgacatgagagtgctctttcaccatttgcacggccttaggttcatcgaaatgcgaacttgtcaaatgcagagccgcattaccggctggttttaacccttcaaataaatataaactccggttttcggcaatttctctggctaactcactggtccccggctctatgcctccgccgtgtatagctaatatgaggacagaagggtcatgctctcgcgttgaaatggaaaaatcggaaggatcttcattcagctttaattcctcgaaaccgccgtaaatatctgaagcggcatcagcccgaaagaacggcagaagcaaaaacggtaaaattaaaactaaaattccttttttggttattgatggcatttgtatgtttatgttacaatacaaatgcttcagcctttgaagcgaacggcagaacagggtgactttggacggtttcttctgctctgcctctttgccagctgctttacggtctactcttctaaccctttttgccataacatcatcctttcttttgtttacacttttgtcacaatattatatacgttggacaaaacctccgttcatcttgaagaataaaaacatcaaaacaacttctatcctttaacctaaaaaagtctttctgttcaaagagacggaaggcttaaatgataaaaatgaaacccttctccagtttgtgaggagagtgaggactgcagggaaatcattttatcaatatgctgagttaggctggcgtccggctcaaatatttgctccggcatagacggttacggagcggccgcttatttcgaagtcaaattcgaacgtgacgtatgatttcccaattcaagaatccccgaaacaaatggatgtaactgctgtttccataaaaaaaagactgctgttaagcagtcttttttcgttttatttcgtgcctgttgatcccagtccgccacggtcattgttcccgagcttgtctacttcgatcagctccacttcaggcattttcttcatgattctgaattggcagatccgctcccccttggaaatgtcggtatcccgaagcgcgaatgcaggaaaaaaccagaagtcattgtcgcctttataagattcatcaatgactcccattgaatttgtctgaatgataccgaaatgcttatatgtacttgaacgcggaacgacatgggcctcatagccttccggcagttccatcgcaactccaagcgggataagtttgaattcaccttttttgattgttatatcttcagctgcccgcagatcaatccaatcgccctgttcaattttactaattctcgtttgcgtatcatctgaatatttaattttgatttgtaaagtcatgttcgctgctccttttgcttccctatttcggtcggtattgatgaccaatccgtgccccattataccatttaactgataagaatgttgattttggtgtatatacagccgaagaggaagcactgcgaagccaatgagaataaacctaaaatgagggcccctcctatcagtttttcctccattttcacatgacagcttcaattacaataatataaagctttatatccgttctttcaacagagcttttttaaaatttcaccttggtttcaaaaggaatttcgttctgaataaagaatttgaagaataagcgcttaaagggcgcgcgactcttttctgtcccctgcctcaggcgcttatatcaaaagaaagaggtgtctttagaatggttcaatttaaaaactttcctgatccgtctttaaacgccccattgcagtctcgccctgcacagccctctgaattggagcatctcaaagcaaggatgcagaattttattaagcattccgcaacggatgataatcttgagatcgcagatgcccgggtgacggcggaaggaatggtcacctcacttttaaaagaacggcttgatacagaatacgaaatgcttatgaataaaatcacccgggaagtgaatgtggaggactacggagcgatccctgacggccgggacaatacggaagcctttcggagagcgatcgggaacggccgggtcaaagtaaatgttcccgcaggagaatttttggttcaagggataaaactcccctcatggactaccatttccggtgagggacaagggattaccgtgcttaagcttcatgaggacactcccgcattcgaatgggtcattactaacgatgattacgaaaatggaaaccgtaatatttttgtcgaaaacatgactttagactggaatcctgatcgtcaatgcggggtcaggaaccccggaggacagttttccagctgtttaacgtttgctaatgtgcaatacggctggattaagaatgttgaaacggttaacgcgggtctccatggtattgatattacatctccgacttacgatcatttgcctgaaacagaatggacgaaagacggctgccgatatatatggattgataactgtgtggcatacggcgccggagacgacggcattaccacccattacagcgagtatattttcatctccaactgccattccggaaacccccgcggcacagagcatgctgagggcagcgcaaactcgaacggcattgaaattgacgacggctctaaacatgtttggcttttaaataactatacgagcggtaatatccgcgggattgaggtaaaggcgcacagcctgtggccggcttctcaaaatgttcatattatcggtcatgtttcgtatcgtgatgtacgttcatttgatattcgtcatatcggccatcatcaggcctcagatcccgaaagcacgacggcttatgatgttactttaaccgattgcaccgcgattgaaccggtattcaatgctctctatgacggtgtgaccccgagggcgctggtcatctctgcctataaaaacgttaatgtaaacggattcacagctattggtgatccctcatacgactatggcgggaatccagtcgtagctcttcaataccgcagtcaaaatattacgatcaacggcattaaaatacgcggctttacacaagccggtgttgacatcaatatatccggcggatcaaataaaaccgattatgttaaaattttaaattttgatatatacaagtcatctcctaaaggcatctcaatcggcggaggccaatataacgtaaatattataaacggtacgatgatcggagacggcggttccgtcggaattacgtcccctaacagtcaggccgtcattctcggggtgcaagcggaaggttacagcgcggccgcatctataaaaggacagacttatgatcagatccccgtcaatttaaagggaggcgcacagctcgcgaccagctccggttttgcattcaacccgacaagcgccgttattgcgggaacaggcgatattacggcaagaggtgacagaaatgcgatcatcagctcttccggaggttcaagttctgaaggttcaagggcatttatcgccgcttcaaacaatgtccatattacgggcagcaaagtctccagaacgattctgtcatcagaaagcattacattggaagaaccatacacggttgccggagggcatcagtccatcaaatggaaactcgattcagcgggcggccacggtacgttcgccggagctgtcacctcttccctgtcagggtacggagaatactttgaaagtgtaaccggccagacaattcccgccgggacaatcgtcacagtgaaaggcgaaaaaattgaatcggctcacgtcggtgattacatgctcggcgtcatttcagaaacagccgcttttatctcaggagccgcaagcttcggatggcaaagccgctttttgacaaacgagttcggcggtttcatttacgaaaatgtgactgacgaggaaacaggagaaacggtacgcgtgccgaaacaaaacccggactgcagtccggctcttgaagctgactatgaagcacgagcggccagagacgaatggcacattgtcggactcaacggccggcattacgtacgggtcgacagtacggtcagcccgggagattatatcacggctcataacggaatcgggactaaagccgcggaaggctggaaggtattgaaactgacagccttatacagtgctgaaaaagggtacggcattgcaattgcggttatcaaatagggtctcaatatcaggatcatctcctctcttttctatcgggcgggtatgatcctgttttttataccgaatgagatgcctctttttcagcataccgtttcatttgtccaagccatccatgctttctgtcatagaatactaccgtcagatgaaaaaaggaggaatatgagtatggatatgggtatgggaatggatatggatatgaacggacattatgatcaccacccaaaacagcctaaacaaaaaaagaagaaacaagataaaaagcatcttgattatgattacatcgttgtttataaaagaaaatgcaaaaaatgtaaaaaatgctgctaacttgacatatcaacatttttacacccggtaaactccgggtgtttttcttattatggcgtttctccgggctattttcacccaaaatccggtcatcctatcacaatacataaaaagactctattattttcttcccttttcgcctaatgaaaagtatttcatttacagaaaacaacacaaatagaatgacatgacttttgagaaaatctactctttgcttggtcaatttttctgcgataccatgaatttgcaacaatttttaaaaatttcctcaggaggtcattgccatgaaaatcgccagaacgatagtcggatcatgcttagctttatctctaacaattcctttcacagccagtgcctcagcagccagtcagtctgaacacgcaaacgcgcctcacgtttcacccgttgcaaatccgttagaaagtaaattatcccaaacagcagaccaaaacgtaaaagcagcaggtgttgatgccgggctgaacgtaaacgtagatgttctcggaatctcagatcgcattgctgaagcggttaagtcagatcaaaaccgaaccggctgggtaaaaaatgtcatggaaacaacattttacgcatcaggacagaagtacaatgtcatggtgttcaatttaaatcaagaatatgaagaccggtttaacggcgttcaattttacggatcagccgtttatgacggtattacttacggaatctgggtcttcgaagacgggtccttcgataacaaaggagacgggggctggatcaattgggcattcagagggtggttcgatcgtgataatcagcatattgaattccacagaccttaatacggtgaaaacttgcggcagcgcccgcaagtttttttaactggactgcacatttttcaccgttataacgactatacttgaagtgcgggctccgatcgcagccccggtaaagtctttcaaagtgaggtataccatgtcaaagtctttaaaaatagtgttgtggagcatattggtgttgatcatcttgttagtgattatcggaatcgtttcttacaatcaaactccgtctgcagaaagcatagcaaaaagaatgctttacagcgtctaatcaatgttaagccttcatcggctttttttatttaccgcagaacacttgacaaaacgacgaattttcaatttattcgttaacgatctcattcagtatagaatatacacgtgtatcatggggcagtccgttttgatacatatatcttctcaaaattccttcagattgaaatcccgcctttatcagtaattgatgagacgctgcattctcaatgaaaacaacagcgcctatacgatgcagcccaagcttttcaaacccaaaagaaagaacattctccaacgcttcaaaagcatagccattcctccaataattcggatgaatctcataaccgacctccgcccgcttatgcttgggcacccaagaattaaaaccaatagttccgattattcccttcgcatcttttctctcgattccccatcgcattccctttttatcatgatattgatctttaaaccagccaatcattttttcagcctgttccattgaatcaaaaggttccaaaccataatagcgtgttacatttgcatttgaaaaacaagcaaatatttgctttgcatctttcttttcaacttctctaagaataagtctgtccgtttctattacaggaagcatttacggtccccctttaaaagcaatgtgagaagaaaatatatgcagactaaaaaaactttttttcaaaaagtaaactagcatccctatcaaacttttcatttcggcataatatgtattaatcctctttaggaggtgagattatatgggattctcaggtggttatggtagctcctttgcgttaatcgtggtgctattcattttattaatcatcgttggggcttctttcctcggcgattattaagaatcctcttacctccgcatccatgtcagcagcacctccatgatcgtacggcgccataaatgaaatgtttatggcgctctgctgtttttccccttttcattcacacattaaaattaaaaagatcggccgatgtatcaacatgcagccgatcagtaattcatagattattgtgtaaggtttacatcgatgacgttatagaaggcattggaagtatccgcaacgtcccatacccctaaaatgacatgatacccgcttcgatcagtcggcacaaaaatcttatgagtcagattcgtatctgccttggaaccgtcgtggtttaccgttccgattaattcgaattcatctcttgacaaaggtttattcggattccagtttttcttggtgatataatagtgccactttgatgtcgcatgaggggccgtgtagtaccaagtaaaggtgttaaaaccgccgcggatgttttgtttcacccaataatctgcagtctgcttgtctaaaccgaagtcaatttgtcccgatcccccatttgcagacgcgattcttccatccggcggacctgcagccggaaatcctttcggcccttctacagactgaggattatcaatgacggagccatatttctgcgcagcggccgtccagcccaatgtttgtttctctaatgctcccatgtacgctctgctgacgggctcttttatatacccgtgtgcagatgcatcacttgaatagaaagcgcctccaataccaagagtaacagttaaaactgcagcttttactaaacctttcattactgcatcatcctccctcttttgttaataaaaacccttcagtgtatacacttcacgatggaggatgaaatgaccttcctttccttgataggaaaaagcaatgagattggcgcttttccctttgttttttataatcataaagaaaaagccgggccgattctgttatcgaatccgcggttgaccggcccgccccttttgctcagaacttcattcgctggatttgccggtttcctttcggataaccggtgctacttccgctgctaatcgttcgatgttttccgcggcttttttaaacggcatacctcctatatcgatttgcgcgagaaatcgctgatgtctgaataactcgtattgatgcatgattttttcaatgatctgctgtgagcttcccacaaataaagctgtttcttttccggacgcccgctcaaaatcttccttcgttaaaggctcatcgatcccgtgatatgaatgaacgtgagaccagtaatttgaatgatacgggtaaaattcttgtattgcctgttcattcgtttttgaaatgaacatatgtccggttacggcaaccttcacattttccggaggatgaccggctttagaagccgcttcccggtatttgtcaacaagcggcttagatgacatcggatcaccgctcagtacagctaatgccaaccccgcacctgcacgcccggcccgttctgcgctttccggagtccccgaaacacctaaccatagcggaatgcttccgcgaaaaggccgcggagaaatctctgcctcgcgcagcggcggccggtaacgtcctttccaggtaaccgattcttccccggaatttaattttaaaaaaaggtcaatgtgttcttcaaaaagttctttataatggcctacgtcataaccgaaaagaggaaacgagtctaaaaatgcgccccgtcccgcaatgatttccgcccggccgtctgaaatcagatcaagcgttgcaaaatcctcaaataaacggacgggatctgcggtggataatacagtcgtggcactggtcagcttaatattttcagtgatctgtgaaatcgctgataagatggccggcggcgaagataccgcataatcaagacgatgatgctcgcctacaccgaatacatcaagccctgcgtcgtcagccagtttcgccagcttcatcaattcatctatccgctgctttgcgctgactgttttccctgtcagaggatcgggatataattctgcaaatgaataaattccaatttccatacaatcacggtgttcagccctcacatgtctctcctcctgcactgtgtaaaaaagcttttatgttattctattcagccgttttacaaataggaattcgttcaaaataaatacagaagcttaacatgcagaaggtcggtatgagagaaaaaaaagtttcaggcgtccttcaattctgcccattatactcatgcagccggactaggcaagaacaaagccggcacaagcggattcgaattcatgtgttcattttcagtccaattcaatccaatcgtgatattgatcataaagctttcgtattcttccggcatcaagagcaatgacttcacaccctctgtcatcatacagaaagaaaataatatcttttgtcatattcacaaagaaaacatcaggatacccaacggaacagcccccgaaccttggcttcagcggaaaatcttcgtggacggctgccttaagtaattgggggatacgcagatttttccgtttacataataaagaaaactgctgtatttcatattcttcttcgaccgggcatggacaggtcttcacttgaatccgatataaatcatccttacacttcagaaacggctgataaacctttaattttctcgcgtgattaccttgagatttgtgcttatacacgttggcaacaagaaataagtcatcgctatgttcaaacagctcattgaaaagcgcggcggtttggtgatgaacaagctgaaaatactcaagattcaaagcaccgctttcattaaattgatacatattgccgccgagagaaaaatgaattcccacgtcccattgatgataaatgccgggcactaattttaaagtcggaaacctttccttcagataatcatttattttcattcaaacatctcactttccttttcccgctccagaggcagaagaagccgaaaacattccgcttatttctttttcacccttgtaatattattccgattggaatacaatgaaatagaacactgtgaaccccattgatcagggtggatgctggtcacattcatcctgattctttcttttacacaagatcgccccaactttgaacccctccgtttccaaccttattcattgatattacatatatttcaatggtattattttcttatgcataagcatcaagaggtgtccgctttgaacaacatcagaagtttaagagaatatttccggtctcactgtaaaataggtctaaactctgaacagcttttaacattttgagtatcaaccatttttccattctcgagcgcatcttataattcatcaaaatgaattgaacattgctgattcgaattacttcccgctccttctgtcgctaaactgcaaaatgtccatcccattcatcctctctccaattttacaacgttgctataatgaatttcatgttttccccaaccttcagcttaatctttttgatcgttactaatctaagtacttttttcaattccataatccattggtatgatcggtaacctaatgaagtatttaacttaaatacaaaaaaacctgctttcagcaagtttttttcgacaaaggggaggttatctccccacaaattctattaactatgtttttgttttaaccattctttctttagcaatgcgtattggaaagtgttttcatatttaggtgttccatcctcgtgtgcagtaaatgaaataaattcaagaaaataaccttctttacgtattcctaatctgtgacctgcagttatcatcttcaacatatgcataaagagatactcaaagaaagccttcgcactttcacttgcgtatcccttcccttcaaaacgggcattgaaattccaacaaacggaataggtatctggctcttcttttaaataaaatagttctccaacttgatcattactgtcttttaaacaaactgcaatataagagtcatctcggcttcttttttgaacgtttacggcagcttcttctaacgtagacattctgtcatcaagaaagcaattcactctcggatgtgcagaatattccaacagaccttgcgcatctctctcggtaaaatttcttaaaattaagcgaagggtttcaattttttgcatttgcagtctcctgtttcattgttatcgatctttgaaaagaacttcttcgtttgttgaagaacttgtctcaatctatttttactataatgatggacgttatcatctttgtcaaaaacaataatcattcttttgccgcccgcgatgaaaagtactgaacaattttcgtgaaaaaccctcagtatcgaatatagaaacgaggaatagtaataaaacaaagttaagccattacaagcttattgagttttttttcaaacttattcacgctcatcatctcatgagtgagaaatgtcccattataaaacacgctgaaagtcgtccaaactgccggggatttttgcgccatatcttttgacgttattcgccgggcctgaaaatgaagtcctttcttttcagtcagttcctttaaatcctttaacaatccgactgcaaatgagcattgggctgtataaaatattgtgattccctcatcattaacgaaattacttttcacctgttttttaaatacaggaggatgtgcatgttcattccacgtcagtgacatcaactgaaaatagggttctgcttcatcttgcacagcaaatcccatatgttcaaagaaatgcttatcacttaaataagggagctttttcttccccactatatgaactatcccatccataccgcgggattttgcatctgacacacatttttctaacaagtgtttcgcatgtccgttattcttatatttacctgagacccaaagacaattaataaacataaaatgaggtgcgcttaccggaacccacgcttcttctgcaggtaaatattcaataaaaacttttgcccgttcgtttaggcgatagaacaccaagccatcaatcatccgatctttgagccagctcttcttttcatttaccgcatcctcatattgtttcgtacctaatgcacagcaaatatgattgtcatcaatattgtccctagtcaactcaatgtactccatttttcctcacccgctttcttttggaaacatcagctttacttgcagtgaacattgtaatttctcagaaatatagagtcccagaaccaatatatgaacgcagcaacaatgctcattatgtaataaatgggcattctgaaaactgtgaaatcaattggcggattatctatgtaccagaacaagaacacagctaaaaaagcgactgctgtataaatgaaaagatgaaccaaactaaactttttaggcttctttcttaaccatagttgcacaggaacagcaaacaaaaagtaaataataaatgcgtaaaaagcaatgataactacagtaaccaatgcaaatggcacaaaacccgagtatacaaacatatatagcccgaagatcaaaccatacgacaaacttgaaaaagccaatgtgtaagtatagctttgacttttgctccaagacgccgctcccatatatttcacctgctttttataaaaatacatttctcatttttttcctattgtttaaaatcagtatatatccatcactttaaaagatctatgtttttttggcagatcatcaattcactatcttaatatccagaaattttattgccattaaaaaaggtcaaggaaataccttgactgtgtatcgctcaccaatctgcatccggctcatcgtgttcgaatccgtaaaagcctttaatccacacatctccgcagccggctccttttgtgatcaataagtaatgatttctgtttgcatcaccattcaccttatcagccgcgctcaagtccaaatgattacccgtgaaattcttttcactaagggtaaaattatctcctgccagtgtaattctctgcagtttaagctcaaatatcgacagaaagattacgaccacaaattcaaagcaagaaacgacagcccccatgcggatagaccaaacattacaaagaacctaagcaaagcttcgaattttgtaagtcttcgctcccttttcgttttacccaatttccaataaacggcgtagcaggaaaacaccaaaatgagttgtccaagtcgcgacacagattctaagaattctataccattcattgattttcacctcgtttatttaaacagagagtccttcttacagcgtttatccaaagcactaatttcttcggttataaaaaccgcttgaggaatttgtttgtaaaatggtttgcgtttgataaaaacagcccatccttactcccccatgaatcaatcaagatgaattttattatctcagatggaaagatgatttccaacagttatgtaaaaataagtaacttcaatatgctaattgtataagaaaagttgtcttatccagcagaaccatgagtgctgcgtttcccattaaagcgtcaaagaagcatcataaaagagccgcttttaggctcattcgcgaagcatcattttatttttatgattgtatcctcctgtcaatcctattgggataaaatttgagggaaggtcagttttaatccgccgccctgctcaccttcgacccttcttgcagcttccccacaaatatccgatgaacagcttttaactcttccctttgcgaatccctgaccgaaatctgactctcaaaacttatctgaccttgcatcgtggggcgccaattctcatgcatcaatttaattcaggatattcgcattttgcttttcgtccgatgaacgtgtgatttccaagataacaagggccataaatgagagtatcatgtccgacacttacattgtttccgatataaatggaatatgccttatctttgattgaaacaaattgttttaacaaatcatgtaaaatgactccctcttgaagatttgtatttgaaccaatcgcacgaatagcagcatttggcgctacttaaactcacgtctcctttcacgctggaaaacggacttatgaacgaagttttatcgattttaaggtatctttgaacccgattaaatgatgtaacagggttagggctgataaagggcaaaaagttagtgagccggtgattgtcaaatttatcttccgtcagctttttatcgctcaaaaaaagcctcctttgaaaacgcatctatttatgtatatatgtaaattctgtgcatttggagatgacacataatatccatataagcctccctgcatagctccctcaacttttgtagagacacttgtccgcaaaaaatgtaagggttttcaaaaggagagcagtgtgctaaattgtaagataagtaaaaattttctgctaatattcgaaaggggtgcatgatttgaaagcagtagtagcaacaaaagacaaaagtatagcgatcgtacaaaaagaattacgtcctttgcgacatggtgaagccaaagttaagatggaatactgtggtgtatgtcatactgacttgcatgttaaaaatgctgatttcggggatgttacaggcgtcactttaggtcatgagggaataggcattgtaactgagattggtgaaggcgtaacaagcctgaaaaaaggtgaccgcgtctctattgcctggatgtttgaaagctgcggctgctgtgaatattgcttaactggccgtgaaaccttgtgccgggatgtaaaaaatgccggctatacagttgacggcgcaatggctgaagaagcaatcgtagcggttgattatgcaataaaggtgccggaaaatttagaccctgcagcagcaagcagcattacttgtgcaggtgtaacaacttataaagccgttaaagttagtgaaattaagccaggtcaatggatcggtgtatttggagtcggcggtttaggaaacttggctgttcaatatgcaaaaaatgtctttaacgctaaagtgattgcgttcgacattagcgacgaaaaattgaattttgttaagagcttaggcgctgatgcggttgtaaacagtttaaacgaagaccccgtcgctaaggcaaaagaagtgactaacgatttagggcttgatgctgtggtcatcacagctgtctctaaaacccctttcaatcaagcgattgatgttgtaaaagcaggagctcgcgtagtcgctgtcggtttaccggtggacaaaatggatttagatattccccgtctcgtgttagatggcattcaggtagtaggttcattagtaggtaccagagaagacctgaaggaagcttttcaatttgctgcagacggtaaagttgtacctaaagtgacaaaacgcccgatcgaagatgtgaatgatatttttgaagaaatggagcaaggtaaagtgaccggccgcatggttatcgattttacttcctaatcattaaggctgccgggaatgatacggcagcctttgatctcgattcttgctcggcgccccacccagactgaatgagactttgtcatttagttcagaaaagaaactttacaaaccattcggcggttatttattttgcaagtactgcctgaactaaccctgataccaatataatgccaggtcattcattgccgaagcgtagccctgctgtcttaacatagttgttatgctgccctgatgataagttccgtgattggcaacatggaataaaatttctgagtaagcagtttctctgtaacctaaccaagggttatttaagttcattttttgttctacatcggtttggctattcatccattcttcaaactgtgaagccagttcttcataagacgccgcaaattcatctgcagaatataaatgagccctttcagcataagccatagaaccttccaatgcttcctgcatgtctattcctttaagtacttgcagccacataacatccaccgcgcagatgtgactgaacgtttgagcaattgtaggatatgaactgtgaacctcttcatattcatcttcactgagtaatttgaggcctttttcgaacttctctaatttaatctacataatagttcactgaatctctcaacaattttagataaacatcttctttttatagagatgttcgttcaatcgacatccttgtgatatttatggtaaaatttatagaaacaaaggagtgttgttacatatgagtcttatcattttagcatccatgcttttatggggtgcagtgatccacgagctaaacaaaccttcaaaaaagcaaagtaaacgaaaaatgatccctttggtatccctcagttctttatctactttaatcatcacaatttcgcttttttctaatttaattggttgatatttgttatgaggaaacccgccagaggttcctcataacactaaaaacctactcactgcactttttacagcagaccttatcagagtgtttgcttaacactttatccattctccccacaggcatcttcttctcactcggaagtgtaagataagctgttatctcatcccctgattttaatgtttttccgcagatagagcattttaactcagtattaaagaaattttttaatcccattcataagcctccttatttacctttataaagtaatacgttaatgctttataaaagtttcaggttaaagaaatactccttgcctgggaatatacttcgtttcagttgatccgcagccgccccggcatcgttatacccttgctcaatcaggaagcttcttccttatatcctccacgacattaaatgcggggaaaacgttcattcaggaattcagcgttaaccaaaaaggagaatacatcctgaaatatgatagcggcaccggtgatagtgtcgatggtttctttagagatctgttgagatctaaattccgttaggaaagtcggcagttttgccgactttcttttacaagcattctgcaggaataaacgtaaagttccgaataaacatacgacctttttgaaacggaaactttatctgcaccacaaacccgcaagcagcctccttgtatcgtaccttccgttcctttgtgatttgttttgatttgtcgtatactgcgcttgcccgggaaatgatgaatattttcgttaactataatttccctgtacctcttcgtatgtgactctgcatgatgaagtaacttcatgctcaccactttcatacacagttttattgcatgtttagccatatccctcctctttaaacagcaaaccgtcccatccatttctctctttcagttaacctcccattattttattgttttagaagctcttcattttagacataacatccattttttcttatttagacttaaatctatgtcgaaatttatcgtccggcatattatgtactatcctaacaacaggaggtggcaataatatggggaactacggtggaaattatggcggaaactctttcgtattgatcgttgtgctgttcattttgttaatcattgtaggtgctgcattccttttctagcacattgacgatttatattcgtctcccaaacattgcatcccttagttcggacagacgccataagaagttttatggcgtttttactttttaaaaaaaccaatctgagataaacattttttattttcactctggtaatctggtaagcgggagagtttccacccctgcctgcgcaaatattgccgctatgaagaatgaagcgaacaatccaatccggataaaaacttgttcatgaacaaaactcctaaatagttgttaaaaaactaaggcgtttttaattcatcggattacagatgttgtgaacttaaaaaggatattactcacctttataaaattgtcatttgttagatttagtcactgaatcttttttgttgtttggtatcttagcggccttccacactcatttaaaaagggtccgcctacaaaattcggtgttcacacattaagtcattttcatataaaaaaaccggattcctcctctaagaggttccggcttttcttagtaaaatgcgggaatatctggtgacgtgctgcacacccccgctattataatatttcaatagagccttctgttccatgaacgcgtattcgctgcccatcttttatcaattgggttgcattttcaactccgacaactgcaggtaagccgtattcacgcgcgataaccgctccgtgggtcatcagtccgccaacttcagtgaccaggccttttatggatacaaacaatggtgtccagctgggatcagtataggaggtaactaatatatccccatcttccaaatcggcatcttccatgtttaaaataacccgtgcccgcccctctatgactcccgaggaaacaggcagccctgcaatcgctccggccgggagattttctcgtttgtactcgcctgtaacgatttcaccgtcagacgtgataacacgcggcggagctagtttttcatatactttatactcgccttttcgtgtgctgatgatttggtaatccaatttatgtgtgcgtacgacttcctgaagttcttcaaaagtgagatagtatatgtcttctttttcatgaataacgctcgcatctgcgagttgttcggcttctttcagtaaagcctgcttataaaggaagtagcggctgatcatgccgtattttggatattctctgaacccgctgaagttccggatgatgcggatcattcgtttagtgtctttggctttttgttcaccatccggtaattgcttcaatcggtctaataactcttgttctttcttcaacgcctcctgccgcccttgctcaaatttccgctggctggcatttggctcaaagtttttgagattattaagaatcatagggacaagtgcagttggcttttcgctccatcgagttcttgtcatatcaatttctccggcacatcgcattccgtacttgctgagataagcatagatagcgtcacgggtttcccgcccgccttcaaacgtcaccagcccatccaaaaagtgatcatcttttacattctctaaataggcaatgacttctgggtaagggcggatcacatcggcgacgtccaatagcgcaagccccatttctgaagtaatattatggggtacagattgagaaagcgtatctgctgcgtttttttcacctaaccactcgttcattttttcgttaatccatgatgaagcatccattgcagttcgaatcaacaccgaactttttgggttaaatagaatcttctttaattccttgatatcttccaaaataaaacgaaataaatcatctcctgatttcgtctggatgttttgttttaactcttctatcgatgcttgactgctcttaatcaaatcagaaacaattgccggatcgttttcagcttgttccggcatatctgcattgcctttgccgggaatcggtgccgttttatcaggtatcggcttaatgaaatcatctcgctctattatggtcataagtgcgtcttttaagagcggatcgtgctgccccatgccttttaagaaaacttctctgacagtaggagatgccaattgatgtgtgacatcaacgaatagccttccgccggctttacgcataggtgcagcagtcgtcaacagaaaaaaagacaatccaaggggttttatgggatccgtcatcatttgctgatgaccaacagagatatagacgtgattttcttgatcgttcgcttcaggaacggggtataacgttgtgatcggccggctttggacaatataaaaagtatcgcggtccaaacaccattcgatatcttgcggctggccgaaatgagcttcgatctgtctcccgatacgtgccagctgtaaaatttgttcatcagtcagtgtttgaatcttttgctgatcaagagcgatctcctgtgtttctgttccgccttcttttcgtccatagatagccaattttttagtttctattctcttatcgacgatttgcccgtcctgtactttataacaatcggcagagactaagccggagaccagtgcttcaccaagtccaaaaccggcatcgatggatagcagctttcggtttccggtcatcggatcagcggtaaataaaattcccgaagcctgtgggaacaccatcctttggatgataacggataaataaacttggctgtgatcaaatccattttgcatacggtaaatgaccgcgcgatccgtaaatagggacgcccaacatttactgatatgctgcaagatcgcatcgacgccggtaatatttaaataggtgtcttgttgaccggcaaaagaggcatgcggtaaatcctcagctgtcgcactggaacgtacggcataggcatgttcttcgccgaaccgggagagttgataagcaactgctttgactacatctgaaggaatttctgtttccataatggtttgccggatttttttgctgacttcaccaatttgattccgattctccactttcagcatggtcagttgatccaacagcgcttgtaacgtttcgttttgttcaatggctttttgatatcctgcggttgtgacacaaaatccttccggtacttgtattccttgaatttttgataattcccctaaatgtaacccttttcctccaacgagcaaaggctgtgttttttcaatttcgtgaatgccgagaaccaaagaactcattctatatctccccttcaaaaaaatttgacaagagcttttcagcatgatataatcataatataagatggataactatgaattttcacacagaaagcacgcgtgttctgattatatcaccgtgtctgtttttgtgcaatataaaaagaacctggccaatttggcgaggttctttctttatttttgtctaaagctctttaaagctgtgttgagatcttttgtgtgaacgtaaatgttcttatacaactcgaatagtgttttatatttttgaacattttgttcttttggataaaatgcagctgcttcatgaatgaactgctctgcgcattcttcaagagagtcaaaccacccgcttccgaaggcagctaacatcgcagcccccatggcgggaccttgttcattctctaacttaaccaccctcgtattgaaaatatcagcctgcatttgaagccacgtttcatttttagctcccccgccaatagagacaaccgtatcaactgattttcccgcttcgcggaatagctcaattgattcatataaagagaatgtgatgccttccattatcgccctcaaaaagtgctctcttttatgggctccgtccattccgatcaagcttccccgaatagatgaatcagcatgcggcgttctttcaccgactaagtaaggagtgtacagcagtccatttgctcctatcggaacagattccactccctgcaataattgttcaaacgattcgttcggcgcaaacgttcttttaaaccagtccaagctgtaccctgcagcgagcgtgactcccatcgtataaaaagaatccttttttccatgattaaaaaagtgcactttccctttaaagtccctttctttgtcttcttcacaggaaagtatgactcctgacgtcccgatactgcataatgtttttccggaagaaagaataccggctccgacagcaccgcaagcattatctgctcccccggcgtacacttttgttttttccaacagcccagtctccgccgctacgctcggaagcagcgatcctacacagtcatgggattcaacaagcggaggacaaatttccgctgacataccaaattgattgcaaatctcctcgctccactctttgcgggtcatatgtaaaagtaacgttcccgccgcgtcggagtattcggtgtgaatggcgccagtcatgcggaatctcacatagtctttcggaagcaaaaaaacagcggttttgtgaaaaagttcaggctcatgtgccttcacccataacattttaggtaatgtaaacccttcaaggacacggttttttgtgatatcaagcagatgatcgccaaatgtctcggtaattctgctacattgaggcgtcgttctggtatcattccaaagaatcgcatgacgcagcacctgccgatcttgatcaagcagtactaacccatgcatttgtcctgaatagctaatcccgtcaatatccccgggttgaacgttggatatcgaaatcaattcagccaatgctgcaattgtttgctgcacccagtcttcaggattttgctcactatatcccgccttctcttggatgagcgggtaacttttggacgtttctgcacaaaccttgccgttttgattgactaaaatggttttaacggcacttgttccaaggtctattccaatgacatacttcattttttcactccttcctctctaaatagatccccattgaattggcccgccataacagtaacttcatgacgggcaattccgggaacttggctgcctgcatctttttacagcgggatctggagcttcttttttcacttgttatacctgtaaaatgtattggtttaatatcgcttttaaccgctcctgtctccctgattcgtttttaattggctgattgttcagcgcatattgctcaagtgttttaaaatcagctcttccttctgcaatttcaagaccaatcccttcagtaaagctgcggtaacggtgttgaatcacatcttcaaacacacgatcttcgattaatttgtgggcggctttcaaccctctcgcaaatgtatccatccctgcaacatgggcatatagtaaatcatcaggctcaaaagaagatctcctgacctttgcgtcaaagtttaatcctccgcttccaagaccgccattttgcagaatttcgtacattgctaatgtcgcagaatataaatctgtcggaaattcatctgtgtcccagcctaaaagcggatcaccctgattcgcgtcaacagagccaagcaagccatgcactctcgccattcgtaattcatgttcgaatgtatgtccggctaatgtggcatgattggcttcgagatttaatttaaaatgattgtctaagccatattgctttaaaaaggcaatggttgttgctgcgtccgtatcatattgatgggtggtcggctcttttggttttggttcaatcaaaaactgccctgtatacccgatttccttcgcataatccactgccatatgcataaatctggccatattatcaagctcaaattttaaatcggtatttaacaaagtttcgtacccttcacgtccgccccaaaatacatagttctcggcgccaagctcctttgctgtttctaatcctttttttacttgggctgcggcatacgcaaatacatctgcattacaagaagtcgccgcaccatggacgaaacggggattcgtaaacatgtttgcagtattccataatagcttaacgccgctggttctcatgtagtcttttatcatgtccacgattatatccagattttgatttgtctctattaacgtacttccttccggtgcgatatcccggtcatgaaaagcaaaaaatggcgcatccagtttttcaaacagctcaaacgctgcatctaccctcgctctcgccagatccatgcctttataatgatcccacggtctttgcatcgtagctgctccaaacatgtctgtgccgtcagcggtaaatgtatgccaataggcaatagaaaatcgcaaatgctctttcatcgtttttccgccaattacttcttgagaattatagtatttaaatgctaaaggattcgtggattctttcccttcgtaaatcactttgtttacgctttcaaaatagttgaccgaaccggaatgagagtgagccatgtgtgatttcccccttaaaaataaattctaaaatgatcattcaaatacaaatgcttttatgtcatgttgcacattagtttgttgcctaaacaaactaacttattttcatcttatataacctcatcagtattttcaatattttttttagttttttacgaacacattagatataataaaggttggattcgctatgtactgcgtttcgcacgataacacagaacgttcaacttaatttaaagattatacaaatggagtggatgaagtggatatcgctgatcaagcctttgtcaaaaaagttaaccaaaagttattactaaacgaaatacttaaaaattctcctatttcaagagcaaaattatctgaaatgaccggattaaataaatcaactgtttcgtcacaggtaaacacattaatgaaagaaaacctcgtatttgaaataggtcagggacaatcaagcggcggcagaagacctgtcatgcttgtttttaataaaaaagcaggatactccgtaggaatagatgttggcgtggattatgttaatggcattttaacagatcttgaagggacgatcgtccttgatcaacaccaccatttggaatgcaattctccagaaatcactaaagatattttaattgagatgattcatcactttattgcaaatatgccgcaatctccatacggtcttattggtatagggatatgcgcgcccgggctgattgacaaaaatcagaaaattgttttcgctccgaacgccaactggagagatattgacttaaaatctttcatccaaaagaagttcaatgtgcccgtttttattgaaaatgaggcaaatgccggcgcatatggagaaaaagtatttggtgcggcaaaaaatcacgataacattatttatgcaagtatcggtacaggaatagggatcggcgttatgatcaacaatcatttatatagaggggttggcggattctctggagaaatgggacatatgacaatagactttaagggtcctaaatgcagctgcggaaaccgaggctgctgggaattgtatgcttcagagaaggctttagtaacatctcttcagacgaaagagaaaaaagtgtccagccaagatatcatagacctcgcccatctgaatgatgttggaactttacaggcattacagaattttggtttctatttaggaataggcctgaccaatattttaaatacatttaatccgcaagccatcattttaagaaacagcatcattgaatcgcatcctatggttttacactcaattaaaagcgaagtgtcatcgagggtttattcccaactagacaatagctatgaattattaccatctatcttaggaaaaaatgcccctgctctaggaatgtcctctattgttattgatcattttctcgacatggttcataactgaaatgtacatacttctatgttttacgctcatctttaaagatgggtttttttattctaggcgtatttctgaatcaatactgacaaaggcaccttctaatatgaaaaaggagttctaaaatagaaatctcctttttcatgtgctaattatttttctttataacggaaatatctgaagtcggccggaatatgatgaccgctcgtatcttggcattgcatccctacaaaagctcctgtaaagaatcccccgccgcggatgtaatcatctgataattttttcgattctaatgcaatgtcgattttgtgccaatcttctttgttaaatgaatacaaataataatatttttcgttttcaatattcacttttaaatagacatacttgacttcacgaggaatcacaattttattttttaacggctgcgaaaaagaaaagttatcacatatcgttaattcaagaatacggccaagttcttcatcatacgtgacttgaagagccgtccaattctctgtattgtaatagttcaccaaaccagcagcttgctgaaaattttccggataaaacgcaacagccgtttccgcttcaaaatggagactttgccagcgtctggctgcaaatgcctgagtaaatgtcgaagttaaggattcatggccgtataatcgtaaatgatttggcacttgagttaatgatcctaatttctccgtaaacggaattcttaacgtttgaaaattaatatttaatgttgcatcctcaaattcatcaacttccggatacgtgtcttcaaacattgtttctggtatagaaggcgcatccacttccaagctcccttcttttccgccttctacataaggccagccatctttccaatagagcttttgaatagctgtttctctgcccagaggacaatatcctctctgctgaaaaattgaatcatcgtccggatgaatgggacgtcccgttaaatgagctaaataccactcgcctgtatgtgtttgtacaatggatgcatgtccgcatttttgcagcggattttccggcgcatgccatgacgttaagataggattatcaggatgaacttcatatggaccctcaatatttgcagagcgggcaattgtagcagcatgttcgaaccgcgttcctccttctgcggttaataaataataatagttcccgatatggtaaaggtgcggcgcttctgtcagctttctttcagttcctttaaaaatcacttttggtttaccgattagtttttgctccttatcagaatattcctgcatgacaatgcctccaaaggagtgccgatcaatacgctgatcccataacatatttaataaatattttttcccatccatatcatggaacaaagaagcatcaaatcccgagctgtttaatgtgatcggctccccccaatcaccattaatcgtgtcacaagtcactaaataattatgacaatctttccaggcgccatctacgaccttaacatccgtatagatcagccaaaactttccgtcactgtaacttaaacatggcgcccagaccccgcctgaattaggatttcctttcatgtctaattgcgatactctctgtaatggatgtgcaactaagtgccaattgactaaatcttttgagtggtgtatctggactcccggaaaccactcaaatgtagatacagcgatataataatcctctccaaccctgcaaatactcggatcggggttaaatcctttaagtactggattgataatcttcattttgaactcctcctcagctattttctgttgactcatcatgttttaagctttgaaatcgtcaatatgatccaaataaactttgtctctattctctaattctcgaaccatgcttttatattttttctcatctaagttatagaaattaatatcaatcatggccagaaccagtaagaacacggggataatggttgttgtaattaaaattcccgtcaatgcctccggcgtttgcacctgatttgccacatatccaaactgatctagaaccaaacccggtacaacccctcccaaggccatgccgaatttaaagaaaaatccgataatagcgtatatgagaccgcccattcttttcccggtcttatactctccatattctattgtttcaggaataagcgcccacatatatcccccggcagtgagacttccggcagcggccagcaatcgaaaggaaagtatcaggaatacattacttgacggaacgaaaagtaaagctaagaggccgatcatattcagtaataatgcatagtttagtaatttcttcttccctaataattgatgaagctttggaataaacggtaaaatgaccaaagcaggcaaacttcccaacaaaccgtaccacttcactaaatccgctctttctaaattatacgttacgtaatagatgccaaccgaattactgattgaattcactccaaaaataataataaagaaaatacttaatacaactagaggccgattaacacgaaattgctcaaatatatccgaaaatttaattttttcttccgatttttgaagcgtgacacgctcttttgtgcttttaaaacaaaagattaaaaggcacccgcctataactcccataatacccatggttagctgccagccaagagattcgctgccggaattatcgcttaaataagcagccagtaagggaacaaaaaatgcaacgacaagtcctccaagatttgcaaataacatacggacagacgttatactaacaacttcttgattatttctggtcattgcagatgttaacgcgccatatggcacgtttatcatggtatatgtaagcgataagccgacataggtgatataggcatatattaatttccccaaatccgaaaaatccggggttgtaaaacagagtatggccaatatgacaaagggaaaagctccgaataaaagatacggtctgaagcggccaaacctgctatttgttctgtcaactattgttccgataaaaggatcagcgagagcgtcgatgattctaaccactaaaaacatcgtaccggctgctgctgccgataaaccaaaaacatctgtatagaagaacaaaagatacgtagacactgttgcataaattaaattacatgcaaaatctccagacgcatatccaactttttcaaccatgctgatcttctttacattttcactgagcatgatttctccccttttcgatcctttacataaggaacatgatgaatggtataacattttatttaaaattatcggccagtgagcggtgtataaaagcgctttcaaagaatgatagcggtttactttcacagagcattttcaacatccaaatggtgatcagatagcagtgaacaggataaaagcttggctttcgctttttatatacctccaattaaatcgagcctcttatccccctcccatttaagacctttacatgatggacaattaaagtggttttattagtttgttgatcgaacaaactaacttgatttcatattataaaatcttttctgctttttcaactcttttttcagagaatttaaaaccggcaaaggacataccatgttgtaattgccgactgcttcgacagacgttaagtaaaaacccccctgtgtcacctgactgacttattaaatgaaaagaacttccatcatcttttgtttagaaaaacttattaagaaacgtgcactagaaaaaatgcgaatcatatataagtgatatcccgtttaattggttgaggaggatattatgaaacctatgctgccttttgaaaaatattttggggatttagaactggtttatacattttatggagctatgcctaccggtgttactgtttcagaaactggtcgtattttcatttgttttccgaaatggggagacaatgttaaatttacggtggcggaaataattagggataaattacagccttatcctgatttacaaaccaatttggttaaccctgagaatatcaaaatgactttcatcagtgtccaaagtgtagttactgatggaagaggaacgctttgggtattagatacggcggcacccaatttttctgaaccaattaaaggcggggcaaaattagtcgctgttgatttaaaaaccaatacaatcagaagagtttatacctttacagaagatgttgtccttccaacaacttacctgaatgatgtccgatttgattttcgtgttggaactgcaggttatgcctatataacggattcttcttccaaaggaccaggagctattatcgtcgtggatttagaaaccggaaacgcatttagacggttaaatggagcaaatccaacttcaccggattcctcttttataccgaaagtagaaggcaaaattttgatgaatcgtaatagggatggttcaacttccccatttaggctggcatccgacggtattgcgatttctcctgacggaaaggtattatttttttgtccactgaccagccgccatttgttctcgatctcaacagaagccctgagagatagaaatataccggacatggatttactttatcatgtggcgtattggggagaaaaaggcgcgtctgatggaatgattacagatgcgaaaggagccatttatgccggagattacgagaacaatagtattcgaaaaatgctgccgaatggcacaatggaaaccatcgcacatgattcgagaattttatggccggatactttttcgattggtccggatgaatacttatatgtcatcgtgaaccaattacatcggcaggctagatttcattatggaaaagacttacgacagaaaccttatagtttacttcgtatcaaaattgatgaatttcctgctccttcctattgaaaataaaaaatgaaggaaatcatataatatcctcatttaaatataaatgattattcgagccgtttataatcggcctattgacgtatataagaaaaaaacagacctcccttgagcctcagaacctgaaggaaaaggtctatcatgaatatcagctgagcaagtcctttgatgggcagcttttattacagagccggggtgataccaacaccctggtctttttattaagggaaaaacactgtaacccgtctgtagtttacagcaggaaaaagactttatctggatgactttattcatgatcccaaaacaatatcttttcattatcgatatccatacatatttcattcccgcctgcagagctgcttgcaataggaattatatttctaggaaaccgatcagaatatgtatcgatcactttctgaagactgctatgatcgttcgctaaaccgtaaatatcctctaacaattgcgtatcatcgtccttacccatccaaaggtctttctctattggtttatagcaaacgtcatactcaacttcatctgttgtttttttactttctaaataacatcctccatatatcttcaaaaagtccttataatctgaaggtaattgattgcctatgttaatttcaagctcttttagttgttcatttgtattaatgctaggatctgtgccagcatcaatcgtaaactctttcaacttttgttcgatcttatcttagtaaagctcattttaatactccttcatatgctatggaaaaacaagttatagaccttctttttagttttaatcgtcccagtcctcatcatcaatccagtcgtctttcgcttcttccagttcttctattaaaaactcaaggaatgtactaccaacttgtttaccatatccctcttggttgtcccatagaatgacagggcattcaccatttttcatcttattagtgtcaagacaataagaaaattcatctacatattcgatcactacaagaccatcggaaaggttataatattttttatattcattggtctgttcgacaacttcagcgccgtgagagtcatatccgagtatcattgttccatatgctccccctgaaccatactcagttaaaaaccacttatagctgtctggaagagttacattgagatcctcttctatttctctaatctgctcctcagtgactcctcccgtgagaattgaattttctttattttcatcaaagaaagtttttatttttgaataatccattaaactttcacctcttattcttggttctcaaattgctgagctctccatctccaataccttcttctgaaacttttatattgtttatcaagtactagatcatttctaaaactctgtccattcccttttaatccatgcaaaacatcactgtacttattatgccagctttcaggtatctccagtatagtaccaggctcttcttgaattaagtgatgtaaatttatttgcgtgccatctttagcaaacggagcattaccatttttcatcagttgtagattcgtaaggcctttacgatttttttgattaagatcaatatctttcattgtatatactctacggcttacatctctaggctctcctttaacttttaccttaccgtctatttcgtatgcttcatatttttctttatttaaccaagggacatcaacttgctgacctgtaaatggctttctgctttcatccaatttctttgcattggtcaaaagttcatttttaaggttttggctatcaaccacattgtatggcacgtcccctgccatcgcaagattatatttagagttatacggaagcagatctggaagtttaacatccttaattttctgacctacctgtcctgccttgtttatgaccttccccgccgcatcagctttgttaacggctcctgctcctttcgttccgacgacagccacagccactgaaccgaccgcatatgtcacccatctagatctggagtaagcatctccgttcaccatatccttttgatacgattcttctattgctgctgaaacagcatcatatgttttaacaggatgaagtactgcattccccagtgctgacaaggtttctcccggatcggttatgaagtcccataaaccggttaccgtgtctttcccaacatcatataaaccaacgccggctccttttaaaatatcccaagtcacttctccggcttcttccagctgttttgcttgttcaagctgcatgacatgttgctgctgggaaggttcaaggttttcatagccgatcttcttcgcaatttccaaatattcatccggatcggtcacaccgtcagcgagttttttcttcaaatccttgatttcccgctctttcgcttcttccttcttaattgtcaggtaagcgtctgagtgtcttgcaatctcgccttttttcttatgtatgtcactttctctgtacgcctcggcattatagtgaagcggagtggcgtttttcccttttcccgtagcgttttggagctgttgaaaatcggcctgaatgaaatgttcgtttgcctcggtttctgcgtattctttcgttagatcgtgatcgagctttccgagcctatttacggtatcgtcccgttttttgtctgctgattccagattttgatcgacatcttctgtagagaaaacatcaagatgaatgatatcgctgatttcatcacagtctgttctgactgtcatacacggttttatctcgttctgtaataattttcagcggtatagtatttccaatcccaaaaagcatccccgttcgacataatatatcggtctaaaaatatttcaaagtttaaatttaatggattatattctgaaccactttcaaatataaatagatagttaggatcaccttgattcactctatccttatcgatcattaaatgacattcttccaacagatagccaataggtattccattgatcccatcaaacaaatcctcatattttagttcttcctctatttcctcaaggctaaataaatgaagccctccgccaatattctcaccctttgaaaggatttcgaaaatttttgcgccattatgctgagaaataaacttcaggtaatcatcaggaagagtgaatttatgattcgactgaaagttttggatttcactaagagacgctttgttcggagaaaaagtcacaagactctctataatatatccctcagaacaaaacaatttaatggcccctttttcatctaaaagacttttcaaaccattgatagtcttatggacaaagttagtcaataaaaacacccccatactcctcagaataattactgaggatacgaatttgttaatcagtaagaattttattcataattgaagcagcattagaagtaaacaaaatataagtgttttttgccgttttaattactatcctatccgtagagccataaggaaacccaatccttactgcatttttctcctgtcccccatagtatggatccagtaatacatcgttgatttctttgattggaatttcaattttagatagttgccaattgataattaatttaccatcagatttttcaactttaatcccaagcaaaattgcatttccccttccgtctatatactaagttaaattgtaacatagggtttgcataaaataacatattaaggaaaatggaaatgattgcccacaattttcagataaggatgttgtgaaatcgttttagtgaaagctgtaaaaaaatattacgaaagaacgccttacctggcgtcttcagtttcaaagaggaggtggagggatggaagtctttagtcttgttcattttttcatttcaccagttctaccgtaccctgaaagccctattaaaggtctgtttcatttatgtcagaagagacagcatttttgctttagtttttggtcggacactccgtcagcagacaagccatatatacgtttcgcagttactgttttcagaacgcaacagccatcaattccgttgttagctgcccccatttttagaagccgtctactcaaaccaaaaccgaataaagaatcacgagaaatacgagtcatcaattgcggagttagattcataacttcaaatttttttggtcatattttggtcaaggaccaaaaatattgttcttttaatcttatgatcaaaaccaaaaaatcccctgacaccaatagtgccaagggattgagagattaatactgagacatgtattgttcgcgctcccacggatgaacctgtgtgcggaacatatcccattcgatttcttttgcttcgatgaagtgttcgaacaggtgctcgccgagtgctgcaaccatgacttcgtttgatttgaattcgtcgagagcttccgccagtgtcgccggaagatctacgatgccgttttccatgcgctcttctttgctcatgacgtagatgttgcggtcaatcggagccggtgcttcaagtttgtttttgattccgtcaaggcctgctgcaagcaatacgcttaacgccaggtacgggtttgccgccgggtctacgctgcggacttcaacacgcgtgctgatgccgcgggaagccgggatacggatcagcgggcttctgttttgcgcgctccatgccacgtagcaaggtgcttcatagcccggaacaaggcgtttgtaagagttcactgtcgggtttgtgacagccgtaaagcttgtcgcgtgttttacgataccggcaatgaaatgttttgctgtttcactcagctgaagatcagcgtctttatcaaagaacgcgttaacgctatctttaaagagtgataggttgcagtgcataccggaaccgtttacgccgaacagcggttttggcatgaatgtcgcatgcagaccgtgtttgcgggcgatcgttttgacaaccagtttgaaagtttggatgtcgtcacaagaacggatggcaccggcatatttaaaatcgatttcgtgctgacccggagcaacttcatggtgagatgcttcgatttcaaagcccatttcttcaagctcaagcacgatatcgcggcggcagttttctcccaagtcagtcggagccaggtcgaagtatccgcctttatcgttcaattcaagcgtcggttcgcctttttcatctaatttaaacaggaagaattcaggctcaggtccaagattgaaatcgctgaaaccgagttctttcatttctttcagaatccgtttgaggttgttacgcgggtcaccttcgaacggcgtgccgtccggattgtaaatgtcacagatgaagcgtgctactttacctttttcagccgtccatgggaagattacaaatgtgttcagatcagggtataagtacatatcagactcttcgatacggacgaaaccttcgatggaagaaccgtcgaacatgcatttattatcaagtgctttttcaagctggctcacaggaatttccacgtttttaatcgttccgagaatgtctgtgaattgaaggcggatatactttacgttttcctcgtttactaattttacgatgtcttctcttgtgtactttgccatttcgtaaaactcctcctctaaaaggtaaatgtatatagcaaaacagttgctaacggattaatgaaagaatcgggacatgtcaccttggcggaaagtatttccccgctggaaacggcctgcctgcatcagttcgtttttcagaagctttctgagttcgtcatcagacagattgtgcttcatcggtttggcggttttttcggatttttcttccggttcggcagatgccttatccagaatttgtttgatccccgccatattgacgccttgttcaatcagatttttgatttctaacagtttatctacatcatggaatgaaaataatcgtctatttccttcgcttctcgctggaaatatcaatccattttcctcataatatcgaatttgccgggcagaaagttctgttaactgcatgacaatcccaattggaaataaaggcattgagcggcgaatgttatcactcatctcaatttcctccttttcttatcttagtctcattataggtgatgttatattttgtgtcaacacaatgtaaggaatcttaacatcaaattctttgaaaattgcaaacggcctaaatcagctctttttccattaaagcatttacggcgctgcaaatcgcatttttcacgtgcgcgtaggttaatcctccttggacatacgcgacataaggcggtctgatgggtccatctgctgataattcaatgcttgctccctgtacgaaagtgcccgctgccataatgacatcgtcttcatatcccggcatatagctcggataaggcgtcacatgcgcattaatcggtgaagcatattgtatcgcctggcaaaaagcgatcatcttatcaggatcctgaaactcaactgattgaatcagatccgttctcggcgcattccatgcagggtttgacgtaaagccgagcttttcaagaaaacgggcggtaaataccgctcccttcaagctttgcgccactacatgcggagcgagaaagaaaccttgatacatttcctgcagtgaataaagcgaagcgccggcttcacttccgattcccggggaggtcatccggtaagagcaggcctcaatccacttggctttccctacaagatagccgcccgttttagcaaggccgccgcccgggtttttaatcagggaaccggccataagatccgctccgacgtggcagggttcccgctcttctgcaaattctccgtagcaattgtccacaaaaacaatgacatcttctttgatttccttaacgaaacgaatcatctcttcaatttcatttattctgaaagacggacgattcgcatatccttttgaacgctggatgccgatcacttttgtattcggccggattgcagcccggaccgcttcaaagtccactctgccttctgatgttaaatcgactgcattatatccgatttgaaattcctttagcgagcctgaatactccccgcctcttactccgacgatttcctcgagtgtatcgtaaggcttgcctgttatataaagcaattcgtccccgggtctcagcacaccgaagagcgcgattgaaatcgcatgcgttccggaaatgatttgcggccgcacgagtcccgcctctcctccgaacacatcagcatagatcttctccagtgtatctcgtccgatatcatcataaccgtatccggttgaaggcgtaaaatgcgtatcgcttactttatgttttctgtagctttgcaggactctccattcattccgttcactgatttcttctattcttttatgaacggcggagatttccgcttctgtttcttcggcggttttttgtaaaagagcgccatgggtcagtgtgtcaaacatgttgtgtataccttccttacatgaatttcttcaattctccgagtatgctttgttcttcctgtacataacctgagacttcgtagcgttcattttcttcattaaaataaaggctgtcgatcatggtctctgatttgatgcgtgacatcaatttgccttcggcggcaggcacatgaacttcatacggcgtcagcagctcccggcgcaaataagcttcgatttccgcttttagttttgcttcatccccggcgattctggcgctgatcatgatgtggccttctcccgctgtcgggatgaagtcaggaagtgtctcatcacgtttgttataggcggtcagcaccggaatatcatctgcctgaagctcttttaacagaccgaggaccgtctgttcatgcccggcataatcttcattggatgaatcaatgacatgaatgatcaagtctgcttccttcacttcctcaagcgttgagcggaaagccgcaatcagcgtcgtcggcaaatcctgaatgaagccgaccgtatcagacaaaaggacgctgtagccgcttgggagcgccatctttctcgtcatcggatcaagtgttgcaaacagcagatcttcttcatagctgtctgagcttgttaattgattgaaccatgttgattttccggcgttggtataaccgacgagtgcagcctgaagcacgccgttctttttacgtctctcccgataacggcttctgtggcggataaccgttgaaagctgcacgttaatttcgtgtatgcggtttctaatgtggcgccggtctgtttcaagctttgtctcaccgggccctctcgtcccgattccgccgccttgtcttgagagattgattccttgtccgcttagacggggcagcgcgtattgaagctgggccaattcgatctgaagctttccttctctcgtcttcgctctttttgcgaaaatatccaaaataagctgcgtgcggtcgatgatcttcgcttcaattgcagtggcgagtgatttaagctggctcggtgacagttcatcgttaaaaatgaccagatccgcttcaagctcttcacacagcgccttcagctcgtctactttccccttgcctatatatgtagcggcatccgctctgttccgtttttgcgtaatccgggtcagcaccgttccgtcagccgtttttgtcaatgaagcaagctcttccatggaatgttcaaagtgctcatctgtcatgtgcggaagctggcagccgaccaaaatgaccgtttctttttttccttcctgttcgttcaaatggatgttcctttctgtgtcgtattgggcagtagtactatcataccaaacccgcagggcgtataccacacatccggcgggttttaaagagagaaataaaaaagagacccctcaaaccggctgagaggtctattcgtgagctgccgcctcatcttttataagtaaatcctggctcttgatcgtcattaaatcgttttttaagtattggtctcccattaaaagtctcatggcctgagcgcggattgatttttcaatcacgtttctgacaaagcgcccgttgctgaatttaatggggcttgtcgtgcttttcactgtcattaagtaatcttttaacttccactcggcttcctggcttaattgatactcccgctctgctatcatgcgctttgcgatgtccatcagctgagtgacagagtaatccggaaaatcaatgctgatagggaaacgcgattgcaggccgggatttaatgacaggaaatgtgtcatttctctcgagtaccctgccaggatcagaataaattcatgctgtttgtcttccatatgcttgacaagcgtatcaatcgcctctttaccgaaatccttttctccgccccttgcaagtgagtatgcttcatcaatgaataaaatgcccccgagcgattttttaatcagatctctcgttttttgcgccgtgtgtccgatgtattcaccgaccagatcggcacgttccgcttcgatcagatgtcctttggaaagcacgttcatttcgaagaaaagcttgccgatcagtctcgcgacggtggttttcccggtgccggggttccctttgaacatcatatgaagagcttgttttccgactttcagcccttgttcggcccgtttttggttgacgaatatccacgcgtaaatttctttaatgttgcgtttcatttcttccatacccactaatgtgttcatttctttttcaatttctttcagaatgctgtgcttggcttcatttttttgcagggcggcctgatattccgcctcagcttccgcatttgtcagcacttgcttttggccattaagaatgatgttaatttgtccgttatttttataggttacagcgcgctccaacatgctcacctctctgttctctctttatcttactcatgatgaagcggttccgtgacatccgcctatcatcatgagacccgttttcctctttatctgtcactttttccgatctcttcgggaatgatgttgaatcttgcgctttcccgagaaatatttttcatttcttattgtattcagcagaaacgggaggacaaaccatttatttttattttccgggaaatgttgggtatatttctcatttttttcatgaatgacagccgtacaagcaccatttgaatatcatcatatgctgtaatgaggtgatggagaatggttaaaatttttatagaccccggtcatggcggaactgattcaggtgcaaccggaaacggacttcaggaaaaagcggtcacgctggagatcgcgctggctttgcgcacgattctgacgaatgagtatgaaggagtttctgtcacgatgagcaggacaagcgataagacagtcagcctgacggaaagaacggatgccgccaacagctggggcgcagattattatttatccattcatattaactcaggaggcggaaccgggttcgaaagctatatttaccccggtgttggagcgccgacctcgacttaccaatcagccgtccacacgcaagtgattcaagcatcgggttttaatgaccgaggaaaaaaaacagccaacttccatgtgctgcgggagacaagtatgccggcaattttgacggagaatggttttgttgatacgtcagctgatgcaaacaaactgaaaacagccagttttattgaaagccttgcaagaggacatgccaagggcttggagcaagctttcggtctaaaaaaaaaggctgacttatataaagtgcaaatcggcgcattcaaagtgaaagcaaatgctgatgcgcttgccgccgatgcggtgtctaaaggttttgacgcgattgtgcttccaaaaggcggcttatttaaagtgcagatcggcgcattctcttccaaagattacgctgaagcgttggccgcgcgggccgaaaaagccggatttgatgccttcattgtgcaaaactaaatgaaaaacccccgctctcccttttttggaacgaacgggggttttttgttattgaagtatatcggcgacaaactgagaccaagcttcaagacgctgatacacattttcctctttcagttcgctcagtttcatccagcgcccggcgatttgatctttttctttcacttcgacttgtgccgcagacgctaactggagcgcagaaaggatgccgatatgcaccttccctacatcgttttcatcatcattgatcaggccgagtgtgacaatgttttgtttgtcctcctcgcggatgtacagttcttccgccagctcccggtcggtattctgtttcagcacttccgtaaatgaagccgtcccttccatagggttcatgtgtccgccgaagccgagagaaagcttattatggaggcgcgattcccctccgccggcgagccgttcatacacaaacacctcatcatcgcggcggatgacgacatacggaatcggctgtttaaatcgcgggtcctcttccgcgtcgcctcttctgatttcaaaaaaatgcgcctcaatttgagccataatgtttacgatacgttcatcctcgctgttgactccctgaaatgtcagcatttcgttttgaaagacgtcactccgcggtgcagccaagatgatttcatccattttattcatgcccgttcctcctgtcttacctctccattcaagccaaaagagcagatattatatctgctcttcatcttggccaaaataaaaatcttcgtccttaatcggttctaccgtcgcctttttgtagccgttccctttcatggagaagaaatcatgtgattttgttttggtgtttaatccgtttaatacgatcggattaatatcctcttcttcaaagtaaggatcgaaccctaagttcatcaaagctttattggcgttatagcggatgaatttctttacatcgtgtgagagtccgacttgatcgtacaagtcctctgtatattcaagctcattttcatataactgattcagaaggtcaatcgcaaattcacgaagctctgcttttttctcttctgtctgtttattataaatttcctgagcaaggagaccgacatacacgccgtgaatcgcttcgtcacgaaggatcaggttaatgatctcaccgctttgcatcagttttccttgtccgtagaaatataacggataatagaaaccgctgtagaaaaggaagctttccagatagacggaagcaaccatcgctttgaacagtgaaatttcatcatctttttgaatggctttgtaaagcccgacaatcatttgcgcttttttctgcaaatatttattctgctttacccattcaaatacttcgttgatcgtttcagtcggagcaagcgtcataaaaatatttgaatatgattttgcgtgcaccgcgttttccatcatcgccatgaaattaagaaccgcttttcgctgatggccttcgacgtgctcggccacaatcggcatgcccgtgttcccctgctctgtatcaagcagtgtcaggccggcgagcaccttcatgtacgtatcctgctcatttttacccaaatacttccaagtgagaagatcgccgtttaatgcgatctcttccggaagccaaaactgctttacgttttggttgtaaaacatttgggtgaaatcatcttcatgctttgaccagtttgctgcgtcataaatttttgtcactgtaaactctcctttaatcaaacgacacaagaaagacagctgtcctgcccggtatctttcgttcttgcatagtaaatggttttgatgcctctatggtgggcatacagatcaatacggttcaggtcacgagttgtcatcgtatctttcaaaaacagggtaaagctgattccctgatcgatatgctgctggattgtcgcgatcatatccaccactttgaacatgtccatatcataagcttctttgtagaagaaccagttattagacgctaaccccggcatcgggtaatacgtttttgaatttccgtatgttctttcttcgatccgttccatgatcggcataacggacgccgtgctggattggacataggaaatggaacctgtcggtgcgatgcacagtctgtagctgtggtacatgccgttttcagcgacaaacgccttcagctctttccagtcttcgattgtcggaatgtgcatgccttcaaagagcgcagcgattttttcgtatgccggtgagaactctttttcgatgtatttattgaaatattctcccgttgcataagtggagccttcataatgctcaaacgtttcgcctttttctttcgcaagctcagctgaacgctgaatggaataaaagttcaccatcataaagaacgtattcgcgaaatctcttgcttccgggctttcatacgcgatgccgttttgggccaggtagccgtgaaggttcatggcgcctaaaccgatcgacttcatcgctttgttcgcgcgtctgactgccggcgcgttgcggatatccgtcgtctcagatacatgagtcagggaatccgtcgcgagtttcaccgtgcgctcaatcgatttatgtttcatgacattcaaaatatttaatgaaccaaggttgcaggaaatgtccaagccgatttcgtcttcctcgtcataatctgtgtaagccgaaacctgtgacgcctgaagcacttcagagcaaaggttcgagaatttcacttttgatacgtggttattcgcgtgctctttgtttacgttgtcctggaacataatgtacggataacctgactcggaacggagaacggcaagcttttcaagcaatttgcgcgcattcactttttcttttttgacacgcgggttgtcgacaagctcctcatacatcgccgtcatgtccatttcgtccatatgctggccgtattctttataaatcgtatgcggatagaatacataagccgctttatcctcacgcgcaagctcaacgaacttatccggaatgacgacaccgatagaaagcgttttgacgcgcacatcttcatctgcagaaatctttttcgtatcaagaaaatcattgatatcgcggtggaaaatatttaaatacgccgcgcctgagccttgtctttggcccatttggtcagcgtaacggaacgcattatcaagaagcttcatgacgcctacaacaccttttgtggcgttttcaacatctttaatcgcttcgcctttcgcgcgaagcttggacagattaagagaaaccccgccgcccaatttagacagctgcatggaaatatcgatcgcccgtgaaatatcgtttaaggaatcattgacttcgagcaagaagcagctcaccagttctccgcggcgttttctgccggcattcaaaaatgtcggtgtactcggctgatattcctggttgatcatcaggtttacatattcttttgctttctcagtgtcgccgtttgcgaagaacagcgcgacgattgagattcggtcctcataacgctcgaggattcttttcttgtcattcgttttcaaagcatagtcattataaaatttaaacgcactcatgaaggaaggaaaacgaaacttctttgcgtaagctgtcttaaacacttctttaatgtcttcaaaagagtaaaggcttaagaattcctcttcgtagtattggttttcaatcaaataatccagcttctcttttaaatcgtgaaagtaaactgtgttttgattgatatagtcaacaaaatagctatgtacagcctctttatctttatcaaactggaattttccatcttgttggatcatgatttcgttatttaactggatccattttggcacttgattttgtgacaactctttctacctcctgagtaaacaattcaacgtctttagatgtgccgctgagttcaaatttgtgcaagatcggcacctgatattgtcttgaaatggtatcggcgctttttgcaaagttatcgccccatactttgttgccgctcgcagcgactcctaataagagatgggcgtatttttcgagaaatgattgtgttgatgccggtacctgaccgaagtttgtcgtgtaggtgaccaaaacaaacggagtgtccacgtggttcgtttcgtccaccttgcggatcagctgaaagtctgttttattcacaaaacgctgaacattccctgtctttgaatcaaatatgatttgaaccatccttatcacgacctatcaaaaataatgaatctcttaacactatatatagtatactaacctctcagaaaaacacaacatattgagatcgatttataaaaaattcatatttttgaaagagcggactttggctctggcccgattaacgcccaaaaaagagagcagaacgagaatcatctctcatcctactcaaggtgtcatgtgtaagccgatgtctatcataacatgaaaaaaaactgcttagtagtctagacttttattcttattttttgtaagaatcacattttttttcgctttcaacggtttcttcaatctccacatcagcaccgatttctttcagtacggctttcagagcgcttgtgatggaagcctctctgatcagttctttgccgtcaacgatgatgctggttccatattcatagcaggaatcatcttcacaagtttcttcccaatggttgattatcaccttgtgtttcaatcgtctcaccctctgcatgatcaatgtcagtacttagtgtagcttgtgcggcccgctttgtaaattcgaacgcttgtgaaatttattcaagctcatccagcgccgtttcttttttcagttcgattttattcgttttttcatcatagcggtatatttttaagtaaccgtcctcgacgatgccgaaacgattatgttccagctgcaccatgccttctgtctgcggttcggtatccgccaagccgccgtcatcatccgtcaccaccgtctcatgattgctgcaagctccaaacagcaaaaaaacagcgatccaaacgagcgtaatcctgattcttctcagttcattttcactttcgaacacgattttccgaacccccttttatgtttccgatatacagcctgcaatatacagatgcgcatagaaaaagaccattgttcatggtctttttcaaaaagtctattcaagctcaagctggacgtttttttgcggggcgaacgtggagatggcatgtttataaataagctgctgcttcccctccgtttcgagcaaaacggtaaagttgtcaaagccttttacctggccgcgaagctggaagccgttgagtaaaaacaccgtgacgaacgtattgtcttttcggatttgattcaaaaactgatcttgaatattaatcggtttcatgtttcgtcctccttggttctcaatacaatactgtttcgattaaatttccagttttcctgctatgcactcgaaaatttccttttttttctgctcaatatcaacaggcggcgtcatatctgtccatgaaacgggcattttattgcgaaaccaggtcagctggcgtttcgcatatcgcctagaattttgttttaattgttccacagcctgagggagcggcacttttccatcaagatattcatacagctctttatagccgatcgcctgaatcgattggctgtcccggatattcatatcatacagccgctttacttcgtcaagaaggccggtttccagcatcaggtcaacgcgctcgttaatccggccgtacaacacttctctgtccattgtaagaccgataagaaccgcattgtaaagcagctcccgtttttgggttttaagatgctctgacattgtttttcccgatacatgcaagatttcgagcgcgcggatgactcttcgcgtattattttgatgaatggctgccgccgcttccgggtcggctgccgcaagcttggcatgaagcgcttccgccccttcttcagccgccaatttctccatgcgctcccggaatacagggtcgccggagttttccgtgaacgtatagtcatacagcacggactgaatgtacagacccgtccctccgacaatcatcggcagctttcctctatcggcaatctcggtgatttttcccctcaccattttttgataatccgccgttgaaaaagtgtcggacggctccaaaatatcaatcaggtgatgcggcacgccttctgtctcttcttcggtgactttggccgttccgatgtccatccctttatatacctgcatggaatctccgctgatgatttccgcattcagcattttcgcgagtccgatgcttagttttgtttttccgactgccgtcggtccgacaagtatgacgacaggctgttttttatttttcaatatgtatcactctcttttataaatctccccctaattatagcattcatttcttcaggcacctatccattttgccctttttcctgagcgctaaacgtccgctaccacccgatcggctcgtttccgacaacctctctcgtttttcctttgagcgtatggcggtgcgttttccgtccttcctcccgcggatcgtaaacgacgccgccgtgctggatctgaatcggctcattgtaggcggcaaaggtggtctctgaaagctcatggtaatgtgttccgtcaaccctcgggatggcagggccggaaatgccgtaatacctatgaaaatggccgttttcaaacgaggtgatgcccgtatagaaatgtgtatgctcatctgtattgctgccgttctccggctgcgaaaagccttcgatcaaatggtaatgcccctgcacaacatccgtaaccgcccggtatgcgtgtgtgtgcggaggtttttttgaccaatcggactgatacaggcccacaaaagctcactcctttatttttttgataaacgcccaatcaaaaattggtgggctgaatactctgttatcatctcaaatttattcttggaggtaccttaattatgaatgaagaatacacatacgcagcagatagtgatatgagaccgttcgggcggcctggatttgggttcggacggccgggcttcggattcggacggcccggattcggatttggattcggacggccgggttttggatttggccggccttggtttggttatggattcggacggccgtttggtttttacggcggaccgtttgtcggagggcttgtcggggggcttgtcggaagcgctttattcaatccgtacctgtacgggggttacggctacggctatccgtacggaggttatccgtattactattgacgaatcaaaaaggctcctccccgggggcctttttatataggcctaatgtcttgacttggcgggcaaagttcggatattattttattttactgccttaaacaaaaggcataaggattatgatgagagggggatttgatatgattctgggttatatcttcctcacaattgctattttatcagagtcaatcggcgcggccatgctgaaggtctcccgcggatttacgcggtttttgccgagcgcgcttgtagtggcaggctattcattggccttttatatgctttcactgacactgaatctcattccgctcagcttatcctatgcaacatggagcggagccggaacggtgctcgcatccattatcggagcgaaatggtttcatgaaaaactggacaagcaggccgtcatcggactctttttcttattagccggtgtcattttgatgaattggtagaaaggagaggcatgctgatgaaaggattactttgcttggcattagccattgtatcagaagtgttcgggagcacgatgctgaagctgtcggacggttttacgcacctgtggcccgctctcggcgtcattgccggaatcggagcctcttttatgtttttgagcttctctttgaaaagccttgatttatccgccgcatacgcgacatggtcaggtgtcggcaccgctttaacggcaattgtcggcttttttgtttttaaggaggccatgacagtcaaaatgatgatcgggcttgttttggtcatcacgggcgtcatcctgctgaaccgttccaagtctcaaaaagctaaaaaaaatcaaacggcccggagctgaccgtttgaactcgtcaagcgcgggcagcttttacttcaacctcaagctccatctccacgtttccttggactgctcgtgaaatcatacatgaggactctgctttttgcgctaacttcctggcgagcgtaaagtccgtttcggctgcatccggctttaataatataaacgggcggtgaatgattttctggtacgtgaacacaccgttcgtgacgtctacaattccttcagattccatatgtagatcttctttatccaggccgcttctttccatcatcgccgcaagcgttataatataacaggtcgcggccgctccaagcagcatttcatcaggatttgtgccttctccgggtccgtccatttccttaggaatggacacagccgtttccagccggccgcttttaatatcgccgacgtcattgcgatttccgggccaatttgcttttaaataaaagtgatgttttgccaagggacaaacctcctttttttcagtttactcatctttcactcgtttgtctttttttaagcttacgaatactcttgattgatcactctttttatcgtacggacaaaccggtaaaattcctccgtttttgtgaattccctttcgcggtaatcaaaattatcaaaaaacgcttcccgctgttctctgctgatctcaagctgtatgctcagcccggtttgcgcctggttattgatattttcggtgtcaaccccggccagaccggtttttgaggttgccaattctgcagaaaatccgtttcgttcgagagctctcaccaattttttcgcccgcttccggtcgcttcctccgacaagagtatttttctcgtcgcctttataaccgtgaactgcgataacataatggtgctgcttaatgctttcgactgctgaaggctcatcgaacctggtgctcgtaatatgaagagtctggttatcatgcgtttttaatccctcaaacagataggttgaataatcatctctgaaagagcggacgatctcgctcaccccgccctcaattctccctccgtgcggcgacatgatcaatacggggctcccctttcgcttattgtacgatatatgataatcatcagggtcttcatgttcagccaaatctttaaaatctgtgtatgtatcagaagaattcgagggatcagggtctgacgcataatgagcacatcttattagtaagaccattgctacgataatgatgacattaagtaaaattcttttcatcagctctccttctttgctcctttctgaaaaatgacatgttcattatatggatttttgtcaataggtcttatcttaacattctattaacattatcatcagtgaaaaacttcccggtttcgaaaaatcaatggattgtcacggttcaagcgctcaaatgccggacatcagtgaaaaaaggttgagagagggcaaaaaaaaagggaggaacgcccgaattttcaggggcgggagattcacggccggaaacggacggcatcaagaatacgcttttaaaaatgaatatccgcctcccgaagcaaatgcacaggacagaatggagcccgtcaaaaaagttctcatctgcctttttgtacagcaaaatgccgttacagcccgctcatcccctttttttatcataatggtccgttttgaaatggagccgtcttttttcatatatataatatcaatcggaagctgtttttccaaggaatgtctcaatattatgttcatgtatatacctccttccgccggcttcactataaacgaacaaaagttccgtttcaactcgatttcttctcctgaaaaagccgcaagtaaccagcgctcctgaaggacaaacaaactgaccgaacatacggcctgttcatatggtatagagagaatcgccagaatgggaggaaaagtatatatgtttggttactcaatggtacaaatggtgcggtcaaatgctcataagctggactggccgctcagagaaaacgtattacagttatataaacctttcaaatggacaccttgctttttgcacaagtttttcgaaaaaaaggtgaaaaacagaaagaaaatgtcagtcatcattgaatttgaagagggctgccatgaatccggttttcacagcacaggacaggtcttatcaaaagaaaaacgctgcaccataaaaaagcagtttcaaacaatcaattgctgcagcgccgaagtcactccatccgcccttcacatgcttctttcgcaatgccgggatatccgtaaaatctatttaaaccgtgaagtaaaagcgctccttgatacggcagctgaatcgtctcatgcaaaagaagtgacccgtaacggcaccgtattaactggaaaaggcgtaaccgtcgccgttattgataccggaatctatcagcatcccgatttagaaggcagagttatcggatttgcggactttgtcaaccaaaagacagaaccgtatgatgacaacggacacggcacccattgcgccggtgatatcgcaagcagcggcgcttcatcttccggtaaatatcaggggccggcgccggaagctgatctgatcggagtcaaggttttaaacaaatcaggatcaggaaccttggctgatatcattgaaggtgtggaatggtgcatacaatataataaagaacacacaaagaatccgatcagaatcatcagcatgtcactgggcggagatgcgctcagatatgataaagaaacggacgacccgctcgtcaaagccgttgaggaggcatggaatgaaggaatcgtcgtctgcgtcgccgcgggcaactccggtccggaagctcaaacgatttcaagccccggtgtcagcgagaaggtcatcacggtaggcgcctatgatgacaatgatacggccagcaatgaggacgatacggtcgcttctttctcaagccgcggcccgacggtgtacggaaaagagaagcctgacattcttgcgcccggggtcgatatcgtatctctccgttctccgcgttcataccttgacaaattacagaaatcaaaccgtgtaggctccttgtatttcagtctgtcgggcacgtccatggccactccgatctgtgcgggaattgccgccttaatccttcagcagaacccgcagctttcgcctgacgaagtgaaaacactgatcaaacaaagtccggatcaatggacaaatgaagatccgaacatttacggagcgggcgcagttaacgctgaaaacgccgtgccgaaagagtaacctttttatcatgagaacggggtcgtctaaacctgcagatgactccgtttttcaggtgaacagatgaaacatttataatgaaggaactcggaacgcttcagaaccggctgtcagaaaaaaagatcaatgcaaggcagtgtatttctaaaaaaatagggaataagtatggtgtagataaaaggaggaatcacaatggcacttacaaacaccgaattgtctgaatggctgcaaaaacagatcggacaaacgcttgatatcagaaaaggagagctgacagacagccgaaacgagatttctgatatggaccagatcatgcttcaacttgatgatgttctcgtccgccggacaaaccatcccgatgactatgtagcggacgaagaactcgtcttaaaagggcacggcacaacctatacggaggaaggaaatgtcccgcttccccaagatgcgtatgaaatccctctgctcggcgacatcaccatccaaaaggagcaagacggattaaaggtacatacagatcgggccgtttatacaatcgggacccggaaaaaccaataaaaaaacgccctgaatcagcggcgtttttttattggtttttttcttctgaatatccgtggaacatcgtgaatgcgcaaagcataatgcctaaaataatgataatcgggagccagatcacggcaaacttataatccggttcggcaaaagcgccgatgaccgccccaaagcaatacagcaccaaagcaagcgcgcgcaatacagcatctctcgtaaactgcttccgcttgtccgctttgtaaaaccttgcggtgagatcttcaaaaaaattagcgagcgttcccgttaatacggtcgtggaaatccccgctacaccaagttttctcgcggctgtcgtctgcattcccattgcgaagctgagcagcataatcagcacataaacagaaatggcatctgcaaaaaagcaggagaacaaagcaaacagcagcaaaacagctccttcaatagctaaagcggcagttaccgcagggggccaaaatgatttctttttattgcctacaagcagggccgcggcaataacgccggcaataaatccgattaacgaggttaacgatttgagtacggcaaggtgccacgagttgccgatcgccaggccgaacagaacgatgttccccgtcatattggcggtaaagatatgtcccaggcttaaataaccgatcacatccacaattcccgctgttaaacaaagaagtaaaagtgcaatatttcggtatgtagtcactgtcaatgtgatccaatcctttctcatgctgattccaacatataagtttactctttgccatttcatatgtccagccggcgtgccgctttttcagagcataaaaaaactccggcgaaccggagaagctactgaacgataaataatactctcgtgccgtcggaatatccgctcatttgatttccaacccatgaaccggccccgcggttatccgacggggttacatatctgacatcagcccccgccccgccttctgtgcagactgccatgggccattcatcacggtcaaacccgggctttgtcggaattcctttcaatgattctttccttctattctctgctccgccccgatcaattgtacaaatctcagaatgacctgccgaaatggcgtcttttatatgatttcccgtctccggatattttgacagcgggaaatacagcacctgatcgtatcgggatgcggcacgagcagcactgtccgaatggatgccggcgcccgtaaagccgaactgaagagagatcaccaaaagcagacttgccgcccatttcataaacgcattcattcacatcctccttaagaagttgatatgaagcgtaaatatgtatattagccggatttaacacacatgatgaaatggcaaaaaaagtttgctgttttgttgataatcaacgaaaatggcggctttacgatttgtctattgaaccggcttctgtttccttatatattttagacatacttatgagccgttgtgatcagtgtcttcggcagataaaaggaggaatgccgtccggtcggcaggcaccggctgtttgttatgtcttttcaaaaacatgaaggcggggaaatccagatggaaaaaacaatgtttcacccacactcacccgagtttcacgaaaacccttttgcggttttaagcagattcagagcgcaggaccccatacataaattcgaactgcagcgtttcggaggcacctttccggcttggctcatcacgcgttatgatgattgtatggcgtttttaaaagacggcagaattacgagagatgtaaaacgggtcatgccgaaggagctgatcgcgaagctgaatgtcagtgaagatatcgattttgtctcagatcatatgctggcaaaagaccctccggatcattcacgtcttcgctctttggtgcatcaggggttcactccccggatgattgagcagcttcgcaccgggatagagcagatcacagaagagctgctggatgaaatggaaacaaaagcagaccctgatatcatgagagatttcgccgcaccgcttccgtttatcgtcatttccgaactgctcgggattccgaaagaggaccgcgccaaatttcaagtgtggacaaacgcaatggtcgacacgtcagaaagcggacaagatgcgaccaaccaggctctcaaagaatttaaacaatatatgaaaacactgatcgaaggaaaaagaaaacatccgggtgaagacttgacgagcaagcttatttacgctgaagaggacggccaaaagctgagtgaatcagagctgtattccatgctgtttttgttagtcgttgccgggcttgaaacaacggttaaccttctcggctccggcaccctggcgcttcttctgcacaaagaccagatggagaagataaagcggcagccggaaaatatccagacggcggtcgaagagcttttgcgttatacctctcccgtcatcatgatggcgaatcgatgggcgattgaagatttcacctataaagatgtttccattaaaaaaggcgatatgatatttatcggcatcggttcagccaatcgggacccggaatattttgatgatcctgatacattaaatatagcgagaacaccgaaccgtcatatctcttttggattcggcattcatttttgtctcggggctccgctcgcccggatggaagcatccattgcctttactgcgcttttaaaacgatttccgaatatagagctgaaaggcgcgcccgaggatgtaacatggagaaaaaatgtgtttttgagagggcttgaaacattgcctgtcagattttaatatcgcccccctgtttatcgggggtttttttaatgtcttataaacagaaatcaatacaacaatgaaaatttagtacacagtaagtttagttctatatagataaaaaaagcggccggattgctccggccgttctctattaccgttttaccaactcatttgtttcgtccagcttttttctgaaagatttaaggaaatttgcgcttatcgttcctttgtttgcgtacagtttttcgcagaatgccttaatggcgttttgcggctttggttccgacagcattgtgacatgattggaagagtggacgtccagcaggtgaaactgtttcatctggcgttcccattctttccaatacgcaccatggtctagcggaatttgttcttcctctgctgtcagataacgttcaagatctccgaggaacaaaccgcttttattacggaagtagtagcattgcagcgcttccggatgaggcagcggcttcatgtcatactcttccattccgtaagcgagctgcgtcttcatcatttgctccagctgcatccggatcgcttcttcggattttggcagaccgcgctttttggcaaggccgatcaattctttcaatacttcttcttcctcagcctggacggtaatgtcttctctgctgattaatgcctcttcaaggttttcaggcttaagatatgctgtaagcatcgtattgatcgtttgcagcatgactgacttaacagatggttttctttctttccatttttcactgtacggagtgtcgatcatgacggcgctttttaccgtatgaccttcctcctgcaagaggcgcgcggtttcatatgcaagcattccgcccaaggaatatccgccgaggtcataagggcctttcggctgtaccgcttggatgattctcttataagaagcggccgtctcttcgattccttgcagcggctctttccctgtcaaacctcttgcctggatgccgtaaaaaggtcgctgactctttttggcgaatggctggtatgcttccacgcctcccgttccgccgtgaaaccaaaaaacaggacggcctttttctctatcattcagcttgacgagttctggaaaatttcggcccgcctcctgcgattggttcgtttttaacagcatgccgatctcctgaagagtgctgcatttctgaagagcctccagactgatgcggctgtctccgtcctcaagtttcttcaacagctgaatagaggagattgaatcgaagccgtattcagtcagcggcttattttgatccatttccgctgccttcatccccaaaatgtctgccacaatgtcagccgcgctcccgcagcggatctgaggattctgtgaaaccggtgcaaggctgatgtcttctgactgaccgccgttccaatacttatggttttcaaaaggatatgtcggaagcggcactctttgaacagatttgccttggtggagtctgtcccacggtatatccgcacctttcacccagcaaaatgcaagcttttcgagattgttttcagccaacagcgtctctgtgacgactgtaccgagagtcccttccagtaaaacgccgatatctcctgatccagtctgctgactgcctgtaaagaagcttttcattccattgccttcttcggaaaatgctctgtactctttcagtttttccagcaattcatcttgattgcgggcaacgagtgccaggcggcagttcatcgcctcacggccggtctgaagcgtataagcaatatcccgcaatgacggagtatctccagtttgcacaaaatcagccagctgacttgcggccgccttaagacgcccttcgctcttagcagaaagcacgataagctgcggttcttgcgcagattctttgtccttatggcgcgggctgtactgttccaagacgacatgcgcattcatgccgccgaagccatagctgttaattgcggcccggcgcgggatcggtctgcccgtatggtcggtgagctgtgtccattcctgattgtcttcggtgaaacggaagcggcttttctgaatggccatttgctcatttgcagctgtaaatccgggaatgcccgggatggtatgatgcttcatggccatcgccacttttataagggcggccagtccggaagcgagttcgccgtgcccgatgcaaggtttcacggtgctgatataacaaggcgcgctttcctcttgatttgcagactcgccgtaacccgctttgattgcattaaactccagcgcatctgccatttcggaggcaatgccgtgcgcttcaatataagtgacggtttgcggatcaacatcggtgtcttcgtacgcttttttcatcgcggccttcattcccgccggattcggcgcgtgaagcgacatgcctttaccgccgtgagacactcctgttcctttaatgaccatgtgaatatgatcgccgtcttcaattgccgcctcaagcggtttgatgatgataacgcccgccccttcgcttctgacaaagccatcggcatctttttggaacgatttcgcccggccgtttttgcttaaataccccattgaatcaaaaccgataaagcccttcggcgactgcagaatattggcggcacccacgacagcctgctcacattcgttatgacgtattgattgaaccgccctgtgcaatgccaccagggttgacgtgcaggcagcctcgtaatattcactcggtccttgtaaattcaaggcatatgatattctgttcggaatgatggacggaatggctgttccattgttcggatcgctgttgcccgcggcaacgaaaacgcctgtcggtctgcttgctaacgccttatttgtcaggcccgcatcctccattgccttccatgtatgcatcaaaagcagaaactgctccggccccatttgtgatgcctctttaggagaaattccgaaaaagagcgggtcaaattcgccgacaccatcaataaaaccgccccatctgagactcgtgtcattctcatcaccggcgtaacggcgccagtcccagcggtccgccggaatttcggtaatacagtgatccccgtttacgatgtgctcccaaaaagactggatatccggggattgcggaaactgagctgacataccgataatcgcgattccttgcttgacatcggcgttatcacaaggcgtatgctgtttcttcggtaaagtgcgctcttctgtttccgtgaccctggcctcttctgaatgcttatgatcggcaagcagttgagaaaacttgctctcatatgctgacgcgaagtggcgggtcagctcctccgcggtcggatactcgaaaaacaatgttggattcacatcgatgtccgcctcttggccgatctcttttgtcagcccgatcaggctcgctgaatcaagtcccaattccatgatattcgcgtcagaacgaagagatggcccgggttcatccatcatcttggcgagcttgccaaggacgtagctgcggatatcatctgtcagactgccggcggaaatcggtgctcccgcattcttaacagccgttcgggccggctgattcatctgttcggttttcgggcggaaccgtttcaaggcatagccttcaaaacgcatcaccacttccgatcggctgctgatgacatctgcgttaatcagaatcatttcccccgtttgtttggtcagcttgatgtgcagccagcaatcggtaagatcttcagggctgctgaaggtgacggaattaatgccgaacggcagatagctttccgcctccgtttgatccaataaagaaagcgaggccaagtaagcactgttggcaattaatggatttacgacataatgatgcgctcgttgtgagtcgctattgttcaggttcactttcgctaaaacggcatcagagcctttgtacaggcgggtgatcgttttaaattcttctccccacacgacggttcccgttccgtctccgtataactcatctatccggcccacttcccggtaagagcgctgaatggccgccagatccgcgtgctgcttttgaaacagatacgggctgcactcggcatacgccgctatgctccaatcaggagacgtgcggctgcggtgcattatgctcagttcaaatccatccccattttgtttcgattctgttttcagctcgatgcgatcgcctttttttacggtaatggggctcgcgtaattcagttttttaatttgtcctccttccgcttcaggaaaaagatcacaaaaatgatcgactgccagactgttatatgtagcgccgacgagtaccggttctccgctgaattgatgccctttcacgtatggatcgtcatcactgtataccgcctgaacgccgccagcgttttctgattcaccgaattgaaaagaagtcccgtggtcaaaagcgtaggccggcagatgaacggcgtgctcttgctgcaactgatcaaacgcgatattctctcctttttcccattgccgcgcacgccggccaatatcagattcagagaaattgagattccgctgatccatgcggtaagcggccagcttttccaacagttcctgaacggaggaagccgtaaatgccgcccgatactccgaatgatgtgttcttttttgcagcgcggatgcgatggcggccggatgaagagatggcgtcttttctaaaaaggccgccagtctgtcaagataggcttcaaaactccattttgttttcgctgacacagggaaaatatattcctcaccgccgtgacgggcctgatcggaattcgggctgatatattcttctacgatgagatttgcatatgccccgcctgccccgaaggaattaatcatgcttctccgcgggatgatgtcccccgtttcggcatccctcatacgctcccaatactcgtttttttcctgcaggtaaaaagccgtttgttcaaggttgatattcggattttgcggttttgcgttaatcgtcgggactaatgtttcccgctccatttgcagcagcactttcgcgagctgggacatgccggaagccgcctctaaatgaccgagatttgacttgacggacccaagcgcgcaaaaacgttttttatcagtatattgcgcgaacgcatttgtcagggcaatgacctcaatcggatctcccaatacagagccgtttgccgctgattcaacataactgattgtttccggattgattccggccttgtcaatggaagacgccatgagcttcgcctgctgtttcggatccggagccgtgtacatctgccttccgccgctatggcacaacgcgctgcttttaatgaccccgtaaatatggtctttgtcggcaagcgctttggagagcggcttcaagagcactgccccgactccttctcccggcatcaggcccgtgccggttccgaagcttttgctttcacttccctgttcaagcaaattcgcccgttcgagcgcatcatatttagacggttcaagcgtgagattgacccctccggcaatcgccatggaacagctgttaagcttcaggctttcacaggcgagatgaatggcgctcagtgagctggagcatgcggtcgtaacgcccatgctcggtcccgttaaattgaaaaaatgggaaatgcggttggcgatatgccaatcccctccgttagagctgagcgcagctttttccaatgacgggatattccagaaatattgattgtacatactgcccataaatacaccgatgccgctgtctgattcctgccattcgtttactctttctaacgagtagcctccgttttcaaatgtttcccatacggtttcaaggcttagacggagctcaggcgtcatctccatcacatggtcttcccggatgtcaaacaagtgatggtcaaaagcgtcaatatgctgcagaaatccgccgtaccgtgttttgcgttcttcttttcgtgtttcttttgccattgttttcagaagaccggatttccatctgttttccggagcttccgtaatacagctgtctccggcttttaaatgctcccacagctcatcgagggtttcagactcgggatagcggccgctgatgccgataatggcaatgtcgtcacaatcagaacgattaacggtgacggtttctatttccggctttggcgcttttggctctttttgttcagtgataaaccgccgcgtttccgtgacaagcggcaccggttcattcattgcaggttccagatgctttgtttcaggaggcgcttgttcggctccgaatgcctgttgcagcttatccgggtaagtttccagcaaatactcggcaagttctttcgtattcgtgtgttcaaataagaccgttttcggcagctcgcccgtcaatgtttccagttcgcggataaaattcacctgcaaaatggagtcgatgccgtatttttcaaagctggtttccggctgaatgcgctcgggagcaagctttatggacttggctaacgtttcttttatgaattgcacagtccggtctgtgactgagaaagacggttctgtgacatcagccggctctttggaagccgcagtttcttcaaccgcctgtgcgtccggctgcttttgcctgatgacaccgtcgctttctgccgccacgatctgctggccgaggtgatgtgacgattccgccataaatgtaacgtaccgatatccctcgctttccagcgcagactgccacgcttcaggatacagccccgggcatccgggtatgcgcagtttggcgtcttcatacagccaccagccttccaaaaggccgaatgtcaggtgagaataaaccgaatggctgctgatctcatttaataacaaaatcccattctttttcagcaccgctttggcattgcgaagtgtccgccgaatattttttgtcgcgtgaagcacatttgccgcaattaccgcgtcatatgcgcccgcctctataccctgtaaagccgggggctcttccacattaaaccgcttataagtcaaatacggattgtcgggaccgtattctttttcagcatgcatgaaaaaggcctttgacagatcggtgtagcaatattctttcacatgatgtttgtactcttttaatcttttgaaaacggccgcgctcgtcccgcccgtccccgctccgatctctaatatccggatttccgcgtccgggtcttctttcaggcgttcttcaatgaaagccgtcaatgtgtcagcgagcacctcattaaaatagtctgccgtttcattgtttttatagattccttccaccaaatccattgaggaatcaggaaacagaacatcagtggcagaaactctgccggataaaatatccggcaaagctctgagagcggtctccactaaggtgatcatcgcctgtttgctgctgtccttgagtaaaggagctttcttttcatcccattcttgccacagaacgtccgcacgctctatcggacctgttaacacatacgtactgcctgactgtttcaaaaagcctttttgcaccaagatggagatgctttcttccagccacctgccgtaaaacccctgcatgacaggctgcgtttcgttttccgtaaaaaatccgacagatttcagctggcctgccaatagtttgtaaagaagatcttcagtgttttgcaaagccgtcccctccttaactcaattgttgtacatgtcttgttactttaggctgatagcttcgcagtttttgcatcgccgagccgtgatgttcagggtatacttctatcatttcttccggtttttcctccggctcttccgcctgtttcatcatgacgaactgattcaacgggccgccgagcaatcgttcaagcgccgccattgcttccggcgcttcaattgatccgactcccgcctgtttcatccgttcttgatagtcggcagatgatacgattccgacactgccccagtagctccaattcatcactgccgccgaatacggccgcgttttagccaaatgagcggcaaaggcatctttgaaactgcatccggcagcataattgctttgtccggccgctcgtgcaaatgattgaacagatgagaagaacaaagcaaagtccagcggctcattttggaacacgcgggccatattcacgctgacattgactttcgcagcgagcacgcttttcaaacggctttccggcatatttgccaggctctgatcctctaaaacaattgcggaatggatgattccgttaatttgcgggtgcgtgcgtttgatcgtttcatacgcacgtgtgagctcattcggatttgccgcgtcagcttcaatataaatcggcgccgggccgaattggctgagtctgtcgattttttcctgaatggcgctgttatgttttcgtctgccgatccaaacgactcgcgcctgatatgttttcacggcatattcgctccatgcctcgccgatgccccccgcgccgccgatgacgacataaacgccgcctttttggtaggcgggccggcttgacaccggctgctgtacaggaatgaggcgctgtttgtaccagtgattgttccggtacgcccaagtattgccttgctcatcaaacggcgctgagaacagctccgcctttgaaacatcttccggacagccggcatcaatcagccttgtttgccagttcggatactcttttgcgagcgagccgaccaacccgtgaatgcctgcatgagccggatcaataatgtccgccggctgtacggactgtgtttttattgtgactgcagtcaagctgattcgcttgtctccatatcctaaagcaagcatggccttaatcactctgtacatctggatgacgcccgcatcctgagcttttaccatgtcatcagcgctgtgaaaaggagcgatccatacgatatgcccgaaagaccctgttgctttcagttcagccgcaacagcctctattttatcttccgggttgatatgaagccgtttcgcagaaggatgatgcaattgaaaagccgcgctttcctcatcccccgcgataaagacaacctcttccgtcttatatgccgggctttgatcacggaattccgcgagatcccacaccggagccagaaggtttgctccatttaatgatgtttccggcgcggggccttccatcattctggaagaaatccctttaattttgacacagacccggccggtctcatcgcataagtcaatgtccatacgctgtattttttcatccgttccccgggagctgacatacgcccacatgcttgtcgtgcatggactgaaaatgtccagttcttcaagggcgaacggcagtgacagctggttatcatctgcgtgcagcttcagaccgattgtcgcttgcaaagctgaatcaagcatacacgggtgaagaacgtattgatctgccgtttcttcgaggaaggaaggcagccggagctcagccaatgcttgattgcttccgatatgaatctgctgaattccttgttgtcctggaccgtagtcaatgccgattttgctgaatgagccgtaacactgttcagaagtcagtatactgaggccgcattgagctttcagtgcgcctatatcacggtgcggagcctccccggcgctgagaatgccggcagccccctgactgtgtatctgcctgccgcttgcttctgtttgtgagtccgtgtaaatgtcatacacgatttcaccgttttccctcgggttcaagctgatttgcgcttcaatcgggcgggttcccgcttcgatcggccgaacccaaacgatgtttttcaggcgggtgacagaaggacgttccttttgccctttgactgcctgagcaaccgccgccctagccatttccaagtaggcaacgcccggcataaccggcttgcctttaataagatgatcggtgaaaatcgtctcttgtcccgtaaattcggatcggtaccgctgctctgttaaatctgatacattttcgtgaagcagcgggtgcagcacccgcgacgtcggcacagcttgcggtttctctgctttcggccgattgtccgtgatccagtaccgctctttcgcaaacgggtaagcaggaagactcatccgttgaggcttgatatcagaatataggccgtcccatttgatatccgcgccctgcacccataattccgcaagcttgtcattctctcggcggcttatcagctcttcgatatccgcttccccgtttgcgcctgccagaatggatttcagggaggttttacccgcttttcctttataaatacccgctatatcataacgtcctttcgcacagctctttagcttgtcccgcagttcttcggtcgaggaagcgataatggccgctctttcttccatcgcatcacgcccctgctgaagcgtgtaagcaacatcggcaagatccgcatccgtaaaagaagcttgcgccagctgctgcgcctgttcctgcagacgctcttcttctttggccgacagcacaaagatttgagggtgtgtgaaaacagctgtttttctttctaccttcgggatatattcttcaatgacgacatgggcgtttacgccgccgatgccgaaagaactgattcccgcacggcgcggcagatgattgccgttttcgtctttcaatgccgtccattctcttttttcctgtacgatgtaaaacggactgtctttcagcttgatatacgggttgatgacctcgctgtggaggctttttgcaagtgttttatgcttcatctgcatcagcactttgatcacacccgcgacaccggctgccagtgacaggtggccgatattggttttggccgaacccagaccgcagtgactcgcataaacggcggaatcgcctgttttttcgtacagcttttgaaaggcggatttcaggccgttgatttcgaccggatcgccaagctccgttccggttccatgcgcttctatataagtgacggttctcggatcaatgcctgctttgtcataagccgttctgacgacttccgcctgggctttcgggttcggtgtcgtcaaggagttcgcacgtccgccgtgattgaccgcgctgcctttaatgacgccgtagatatgatcgcccgctttttccgcttctgacagctttttcaaaaacagaattccggcaccttcactgacagcaaatccgtccgccctgtcggagaatgttttacatttcccttctttgctcagcgcacccgctttgtcataagcgatgtggccttgcggagtgacgacggtattcacgccgccggcgatcgccatatcgcagttcccgttttcaatggcgcatacggcgtgatgaatcgcgaccagcgagctggaacaagccgtgtcgatcggttcactcggcccgtgcagattaagcatatagctgacgcggttcggccccgctgacggactcatatttgcggctgacgcaccgccgatatccaggtcggaaaacagtgagccgtatccggtattccccgtgccgatatacaggcctgttttcgtgccggaaaggcttttagcggaatatcccgcatcttctatcgccttccacgcatacatcattaacaagcgctgctggggatccatctgttcggcttccagcggtgaaattccgaagaacagcggatcaaaatccgcaactccgtcaataaatccgccccactttacatttgttttattggcttcattaagcgggtcaccgtaatactcacgccagtcccagcgatccgccggcacctctgttatacaatcttttccctcttctaagttgcgccaatactcatcaatatttgcggccttcggaaacactccgctcatgccgacaatagcgatcggttccggcttatgttcagccgccgtctgaacaggctgtacggcagtttttgcaaatcgtttgttccctaccagtctgataccgccatcatcagttacgctgctttgtttttcttctttcggctgtgtgctgccggcaaattgtgtttgatagtcttctgctaaatgatgcgctaaggcttgaatcgtcgcatattcaaaaaatacggtcggtgtcagatcaagctgataagtgtcattcagcttgttggcgaattccgtcagcgtaatggaatcaaatccgtattgattaaactccaattcgatatcgatttcttcaatatttattttcagaagcccggaaacctcttttgccagcaattcctgaagttttgccgtcaggtctttcggcgcaggcgtttcctccgttttcttaaccggtgcaaaagcggctgccggagtcttttgaagcagcttttcccgcattacggcgcggtttccttccatgacgagcacgcttgttttccccatgctccatgcgttgtaaagagcttctattccggtctcagtgcgcatcggcgttacgccggttcttttttcggtgagcttcgccatttcttcattgacttgcattccgccgtttttccacagcggccaattgaccgacaatgtgtgaccgtggcggtacattgcggtaaccagtgcgttgcggtatgccgcatagctgtccataaatgcgtttgccgccgcataatccgcctgtcccgcattcccggtgacgccggaaatggatgagaaaacgatgaaaaagtccagcgctaaatgctcggttgcttcatcaaggttgacaaatccgtccgttttaggagccaatacactgtaaaactcttcggttgttttctttgcgatatactgatctttcatcacacccgcgctatgaatgatgccgtgaaggccgccatattccgtctcaattgttttgaccaggtctgccgcagtttgagcgtttgttacgtcagcctgcttgtattccgcttttgctccgagtgattcaagcgattgcagctgcatccgctgattctcgcttaatgccgaacggcctgtcaaaaccagtgtcggctctttgactttgcgggcgatttctttcgcgaaaataaagcctaagcccccggctcctccggtaatgagatatatgcctccgtcgttccacggaatgcgtattttgccgccggacacgtccgtttctttgacatctgcgcagtatcggatgccgttttcatatttgatatggctgtcatcagcccgtgttttattttctctgatgatgtctgtgattctgccgttttccgccggttctatttcaatcagctgggttttcagttttttatgttccaggccggctgtttttaacaaagctgaaatgcctgagagcagctgatgcttatctgttttagagagaaccgtctggatgaggacgtctccatccgtctcttccttcagcagtttttgcagcgtctccaatatccgtcctgtataatcacggaagcgcgccgctttcccgtgcctggaggtcatttcaatacattcagctcccgcggcttcaacggcttgtttcaatccggcgtctgtgtcacaaagcaacacgatatgccgggcaaaaaccggttccgtttgagtagcagtttcatcgcttcgggtccataccggctcaagcatgagcgtttccggagctttttcttttttctcagattctttttcagccgttctgaatgacaaacctttcagccttacgcaaaccttgccgttttcatcacaaatatcaagatcgcgtttttcaatctggccggctttgtggtcttcagaaagtctggcgtaaacccacatctcggcagcgcatgcgctgaatacttcaagctcctgaaccgcaaacggaagcatcagtttttcatcatttgttccggttaatatgcttgatgcctgcaatgcagagtccattaagcccggatgcatgacatactcctgtaccgtgtccgcacaagccgcatcaagtgacagtctgcccaatacgaaatcatcacctgtataaatcgctttgacaccccggaaagccgggccgtaatcaaaaccgattttgcggtacatatcgtacacttcatctgcagaaaacggtgtctcggaggattgtgatctcagcttttggagatcaatgaccggtgcctcggcgtcagggcggactgatactgccccttggctgtaaacggacggctgatctgttttccggccgctgtaaatgtcaaattgaacgtcatttgccgtttcaggaatgagacggatgttgacatgaaccggctcgtcttcaatggtgatcggccgcacccaaaccgtattcttaagcttgacgcttccttgtccggccggaacttcagatgcctgttccattgctgcgcgcgccatttcaagatgtgccactcccggtaaaatcggtacgccttttacaacatggtccgcaaggtaaaattcttttcctgtatagattgaactgaaccgctgttctgcaaggtttgaagtatttctgtgcagaagcggatgaagcgcgtcttgttttccggcagatacagtgcttgttttttcgtgttttccggtgctttttgccgcccaatagcggtcttttgcaaaaggatacgatggcaggctcttgcgtttaggcggccggtctccatacagcttcgcccaatcgacgttcagccctttgacccataattcaagcagcttcgcgtatttgccgcgtgccatccatttttcaacggcttcttgaatttcttcatcttccgtcagcatttgcagcgtgcctttgtctattcttcctctgtacaagtccgcgtgcttatctccagtgataaactgtgacagtttttcctgcagttcttctgcagatccggcaataaccgccaggcgttcttccatggcgtcccttccgatttggagggtatatgccatagaaacgagggaggattgatcgtaccgtttttcagtaagcacacgtttcagctgttttgcctgctctttcaggcgtttttcatttttggcggacagaacgaaaagacatgggtcgatatgagaatcatctgcttcctctctgtcttctggaatgtattcttcgatgacgacgtgggcatttacgcctccgatgccgaatgagctgatgcccgcgcggcgaggctgttcgtttccgcgttcgtccgtctgcgtcttccattccattgtctcccgcaccagataaaacgggctgtcttcaagctgaatgtacggatttaccgtctcacagtggagactttttactagtgtccgatgcttcatctgcagcaaaattttaataatgcccgctgctcccgcggcaagggataaatggccgatattcgttttgaccgaccctaagccgcaatagccggccgctttctcttttccgtctgcaaacgcgctgaacgcttgtttcagtccgttaacttcaacgggatctcccagttctgttccggtgccgtgcgcttcgatataagagactgttttcggatcaatgcccgcttttttgtatgcggctttaatgacttccgcctgttgtttcgggttaggcgttgttaaagatgccgcacggccgccgtgattcaccgcgcttcctttaatgacgccataaatatggtccccatccgcctcagcggctttcagctttttgaggaaaaagagaccggctccttcaccatgggcaaaaccgtcagcctgatcagagaacgttttgcatcttccttctttactcagcgcgcccgctttgtcaaaactgatatacacgtccggaagaacaatcgtattgattcctcccgccaaagccatgtcgcacgttccttcttcaattgaagaaacggcatggtgtatggcaacgagtgagcttgagcaggcggtatcaatcggctcgctcggcccgtgcagattgagcgtatagctgacacggttcggtccgacagacggacttgtattcgccgcggatgacccttcaatcgccgcatcggcattggctaaaagagaaccgtagccggtatttccggtcccgataaacacacctgtttttgtgcctgagagactctttgacgcatacccggcatcttcgatcgctttccacgcgtacgtcagcaagaggcgctgctgagggtccatttgctccgcttcccggggtgaaatcccgaaaaataacggatcaaattcagcaattccgtcaataaatccgccttggttgacgtttgttttattggcttcttttgcgggatccccgtaatagtcccgccagtcccagcggtctttcggaatctcggtcatgcagtctttgccttctttcaggttctgccagaaagcttcaatgtcttctgccatcggaaaaatcccgctgatgcctacgattgcgatcggttccgccccttggccccgctgcactgtctgcggaagtgtctcaggcagagtgcggcgccgcttaacggccgggcgcgtgatttgagtctcttttaccggtcttgccgattgaaccgtttttgtatttaccgcaaaccgtccggcaaattcctcttcgtattcactgattaaatgaacggcaaattcatggattgtcggatgatcaaagaaaatcgtcggcgttaacgtaagccggtacgttttgtttaactggttcgtaaactcagtcatcgagatggaatccagcccgtattttgtcatttcttcatgagggtcaattttgtcaatgtttacttttaacaatgaggccgtctgctgttttaacagatgcttcactttttcaagcaggctgtcagcatcaatgtcatgacgtacgccggtctctgcttccggatgatcattctctttgcggaacagttttgctttcatatgtttcacatctccttcaacaaccgtcatccgggttgtcccgctcatcaagccttgatataaagccttgatgccggcatctgtgccgagcggtgcgattcccgcctcctgcatcagcatatcttccgtctgctttcctgcctgcattccgccttctttccataacggccagctgacagaaagcgtctttccgtatctttgtcccgcggcttgtaaagaacggcggtactcggcatacatctccataaagacatttgcagacgcataatcagcctggccgacgcttccaagcacacctgataaggatgaaaagacaataaagacatctaatttctcatgttgtgacgcttcatcaagatacacaaggcccttcactttcggagcgagaacgtgttggtattcctctgccgtcttcttcaccatgtagttgtcttttataatgccggcactgtgaacaatcccgtccagcttgccgtgccgtttgcggatattgcggatcaatcggtatacttctgcttcgtccgtgacatcggtctgctcgtagaaaacagaagcgccggcagcacgtactgtttccagcatgtctttctgcttttctctgagagcggaccggccggttagtatgatgacggcgtcttttgtacggtttgcgatctcttttgcaaagatcagacctaaacctcccgcacctcctgtaatgagataaacaccttcgtctttccacggaatatccggctccgcttgagaaatctccatctcttcccaatcagcggcaaagcgcttgccgttttcatatttcacatggacgctttcggcatgcatacggttttcggacgctttttccgctatgccttcagcactttctttctcctcggcttcgatcatttgacagatcagcttggaatgttcaaggcatgcggttttgaagaggccggtaatgcctgaaaacacccgctgtaagcctgctgatcgcgtaacagcctgaaaaagaacgcggcccttcggcttgcctttcattatggttttgatatggtcaaacagctggcccgcataagaatgataccgctctgcaatagatgcgggacgctcgtccaagataatgacgcttgcatgttcaagctttgcttcgacagcttgttttacggcttcatcgtactcacaaaggaaaatgatatgctcttcatatgaaggcttgtgatcggccggttccgtatgctctttccagaccggttcagcgagcaatgtgtccgtacggctgaccgaaacgccggcacccgcgttttcttccatgatccgtgttgagaaacctctcatccgcacacaaagcccgccgttattgtcatataaatcaatatcggctttttggataggatcgccggctttattgttcgcactgaatgtgacgtgcacccacatatcatcagcgcacggattcagaacgtccagctcctctaaagcaaacggcaatgcggctttgaatggttccccgctttctgcaagcagcgctctcgtcacgttttgcaaatattcggcggcctgaagcgcaccgtccatcatactcggatgaaggatataatcagcttttgtatgagagacggattcaggaagcttcaatttagcaagcagccggtcatcgcctttgtatacaagctgcacccctttgtatccgggcccgtaatcagcaccgatcattcctttgtaaaacgcttgagattcgattgttccctgtgtgcaccggcgcttcagctgctcaatatccgccgcttcctccggttccttccggatgatttcagcgatgccctgattataaagaggagcttcttcaccgatagaatcgttatccccgtacattctgtattgaatctgtccgtcctcttcttcataaaatccgatatggacacggacagcctcctgatcggctatcaccggacggacccatacaatattctttaagcgcaggcccagagattcctctgttgccccgccgatgcttttctccgccgcggcccgtgccatctcaagggtaacggcagccggcacgatcgccattcctttaatgatatgctcggcaataaaatactcttttcccgtgaattccgaactgaaccgctgctcctgcaagacggatgtattctgatgtaccagcggatgcaaaagcttggtatccgtttgcttcacagttccctccggccagaagcgctcttctgcgaacgggtaggtcggcgcactgattctttgcggcgcggaatccggatacaataagccccaatcgacacgcgctccttcaacccagagcgccgcgagtgctttcagcttttcatcccgtgtctgacatgccgcaagctcttccatctcctgagctgacacttctctgcttctcactttttcgccccgtaagatgttttggtcattgccgttgatgaaatcctgcagctgacgcttcaaatcgtgacgatcatgactgataaaaacggccctctcttccatcgcttcacgtccggtctgatacgtaaatgccagatcatgcaaggaaacatcgttttcggcttcatccagaaagccggataaacaagatgcataggcagtaagacgctgcttatttctcgctgacagcggaacgatataaggcggctgtccgtcatttgatccgctgatcgttttgttttcatactgttcaaaaatggcgtgtgcgtttgttcctccgagtccgaatgagcttaacgctgcgcggtgcggcgtctccctctccggtagcggttttctcttatccgccacataaaacggcgaaccgctgaatttgatattcggattcggtgacgtgtaattaatggtaggcgccagctcccgatgatataaactcatggcgactttgatgcacccggccagacctgctgctgtatccaaatgtccgatattcgtttttacggaaccgatcccgcaatactgctcccggtccgtgtaacgtttatacacttgctgcagcgcggacatttcaatcggatcacccaatgtcgttcctgtgccgtgcgcttcgatataggaaatcgtctccgggtgaatattcgtgctgtctaaaacatgctggatgacgtcagtctgaccttttacacttggtgcgtaaaaaccgactttatccgctccgtcattgttcagaccgatgcctctgagcatggcgtatatgtgatctccgtcctgaacggcttgtgacgcctttttcagcagaatgacggcagctccttctccgcccgccataccgtcggctgaagcgtcaaatgctttgacatgcccgtcgcttgaaaaattcaatccgttttggtgcacatagccgatgccggtcgctgcatgcagagttgctccgccgacgagtgcgtattccgattctccgctcgttatgcttttgtaggctgaataaagaccgactaatgatgatgagcaattggaatgaacgaaatagcttggcccttttaatccgagcttatgggaaaccatcgtcggaatagtgccgctctgcgctaacacccatgacacatagccgtcgggagattcatggccttctgtcgttttctccggcaaaagcgaccgatacgaattattgcttgccgacatataaacgcttgtcttcggaatctctttcgatacatatcccgcgtcctcgacggctttccaagaatgaagcagcagaagccgaagctgaggatccataaattctgcgtctttcggagaaatgtgaaagaactcagggtcaaagagatcttttccttctatcgtcgataatgccggcacatagtcgggattttcgatcaaatcttcaggcacgccggcttcccgaagttcttcttccgagtagaaccggacgctttcctttccttctcttaactgcttccaaaactcatgatgatttttcgcgccggggaactggcaggaaatccccactatcgccacactgtcatcaaagtaagacggcaccccgttttgcggtgtttgttctctttctctctcatcttggccgggcgcctctgattcagccgcctgttttgtttcaacaataaatcggctgatcgcctgaatggtagagtgttcgaataaatccgtgacggtaaaatcgcattcaagctcctgtttaatgcgttctgccgccgcaacagccagaagcgagtcgcctcccacatcgaaaaagccgtcttcgattttgatgccccccgtattcagcaggtcttcccatattgcggtcactttcgcttccgcttctgataacggcagtctgcccgtcttttcagaccggtgaacgattaccttgcgctgttttaggtctttgcggttcacttttccgctcggtgttaacggcagtgcatccaggcggataaaatgggcaggcgccatataatccggcagactcgataaaagatggttgcggagcgctttttcatctgccgtatgaccggagcgggccgtataataagcaatcagctttttatgtccgttcttttcctgaaccacaaccgcctgatcaagaatgtccggatgttcgctcaatttcgtttcaatcgctcccaattcgatgcggaagccgcgaattttcacctgactgtcaatccggccggcatattctatatttccgtcaggcagccatctggccaaatcacctgtcttgtaaagtttttctccttcactaaacggattatcaataaatgatgccgccgtcagctcaggctgattgtaatagcctctggccagaccggcgccggccacgcaaagctccccggccacaccgtcagggacggggctgagcttttcatcgacgatataaagccgcgtattgtgaatcggtttcccgatcggcgtattcctgcttgtgatttccttttggccgcagctgtagtaagcggcataaatggatgtttccgtcgggccgtatatgttttcaattctggcatgtttgaagatggaaactgactttttaactaaatctttcggaaacgcctcaccggccaccatcacatatttcacagggccgtcttctgtaaatgccgtatgccgctttaccgtttccagaaatacattaaacacggcgggcgcaaaattcagatgcgtgacctggtgggtttggatatattccatgcaaagctgcggatttttttctgcaccaggcggcaaaatgacaagccgtccgtttccgataaaccagccgaataattcagaaatcgaaacgtcaaatacgtaattcgtttttaacagataggcatcctcttgagcgaccggatactcagcttccaaaaactgcagcgtattcatgatggccctgtgctcaaccatgacgcctttcggttttcccgtgcttccggacgtatatagaatataagcgagatgatgcggttttgaacgcggcgtcagttttgccccgctgacagaacgtccgctgttttcaatttccaccgtgctcacaccgccgatggccaactgttcaatcatgccgcgcgtcttttcctgcgttaatacgattgacacgccgctgtcagtcaacacgtgggccatccgttcgtttggaaaagccgggtccagcggtacatacgcgcctcccgcttttaaaatggcgaggatgccgatgaccatctcaaaagaacgctccgtacaaatgccgaccgggcattccggtgtgacgcccttttcttgcaggtacacagcgagcgccgtgcttcgttcatctaattcgcgatatgtaagactgttttcaccgaatgtgacggcttctctgtcagggtggcgtccggctttttccgcaaacacttcatgaatgcagcgctctttcggctgatgggatgaacggctttcatcccgtctttgattgagcaggccggaacaggcttcaaaagcgatctccggatcagaaagcaccttttctgccagtttcatataatgctccgccattcgttcgatgaaagaagggctgtagacatccgggttgtacagaaattgcaggacggttcccgtttcttttttatagacttcaagcgcaagctcaaattcgccttcctgatgaatgtcttctatcatttcaatgccgagtgattgatatagttccgccagcttttccgctccttccgtccggaagaagttttgatagaaaaacgcggtttgaaaaacaggcgacaccgcaggcgagcgttccgtcttcaattctttgacaagcgcgggaaacggatacgcggcatggtccagcccttctgccagtgtcagctgcagctccttcaaaaacgacgtaaaagatttggcgcccgtctccctgcttctgaccgcgatcatattaataaagtagccgatgacagactcaaattgagcctcagaacgccccatcgtcggcatgccgacgatgatatcttcctgattcgtatattgatagagcagtcctttgaaaatagcgagatacacaacggattcattgacattatttttttgggcgcaaactttaatctgccggttcagttcatcaggaagcaagcgctgatacgcctgccctttgcacgtttgaaccgatgatctcgggtaatccgacggaagctcaagcaccggcagcggtccttccagctgctttttccaataagagagatgcgtttttcccgcttcgctttccagcagctctttttcccatttcacaaagtcatgataatttgcggcctgctgaagcatgacaaattctttgccttcacttgcttttgcataagcgtccagcagcgccgacataaacgtcataagagagacgccgtcaaaaatgatatggtgaatggtgattaacacaatcggctcccgcttcgcccgccggaatacttgaacacgcaggagcggcccggtttcaagcgagaacggttcttttgctttttctttaataaacgaaagagcgtcacgcccgcttaattcagaaagatccatttcttcaatcggaaaatgccgatccgtatcttctatctgatacggaaggccgttttcctcttttatcacactggtcaaaatagggtgctggcgctgcacggacaaaagggcgtttttgaatgtctcgatatccagcttttgaaaacgaaagcataacggaatgttatatgcgctcatctccggaaacattttctgaagcatccacaaacctttctggccttcagaaagcggacgttttgcagttgtccgcttgaaagcctgaagcttttgttctacttcagcgatggtgagcgttcctgatctgtaggcatcgagaagttctttatgattcataggtcttactcccttctatgatgtcttgcactcttttaaaatctaatgtcccctcagagacctgtttcatcatggcgatgatctcctgatccgtatactccttgttatccggagcggcggcttctgtttcggtttcttccgttctgtaaaacgtttcgatcgtttctttgtgttctgtcaggtaatagctgatgacgtctccgagcgtggcatagctgtaaaataacgccggagtgacttcaatgccgtaatgacttgtcaaaagagcggcaaatttggctaaatagatggaatcaaatccgaattccgcccagtttttatgcaggacgagtttatctttagatattttcagcagactgtgtatcagctctttcaaatccgcttccagccgtttttccgcgctttcttccgggatgcggcggctcacggtttccaaaagcgcatccggttttgatgaatcgtcccgccgtatgcctaaaaatcgttcggcacggcttctttcgccggcaatgataaggcactgggtgttgtcttgagaaataacgcgctcaaacagctcaatgccttcatctgtttctaacaggcgctggccgcttgatttcaggtacatgcccgtcgtctcttcaccgccgacggccattccgccgtttttccagaccggccagttgatgacaaaagcgtttccgctttctgattgttcgtttttatagtgggcatacgccatttggaacctgttcgcgaccgcgtaatcacagcagccgaaatctcctaaaacagccgatgtggatgaaaagtagcagatgaaatccggcgtttcgtttttcagccactcgtcaagaagcaggcttccgtttattttcggttcaagcgtactgcggaaattcccgatttcattttcaaagacggatgttctgctttcgatgcccgccgcatgaatgacgccgtgaatggctccgaatcgttctttcgcgcgcttgatgcagtcgcccattccgatcggatcacaaacatcggcttcggcgtaaagaacacccgcgccgagattttccagggatttcattttttctttcttttcttcattgatcggcgaccgccccgtgagaatgacatttgcctggtagttccgggcgagatggcgggcaaataagcagccgagccctcctaatccgcctgtaatgagatatgttccgccggttctgatcctgccgttttctttcgttagtccggttggttcggtgtgatagacatatcgttttccctcttccaagaaaacggtatggtctgtttcagctttcagctcgtcccaaatggttctcatccagtccgttatggccgctccggcttttctgaagtggccggtaacacttgttttcgggagaacaatgccgagcgaacgctcaaagccgatccatgattccaagtagcacctttccagaccggatgcatattcccccgccaataacagcctttccggctgctgaccggtctcagccattgcttggagaatatggacgatacatgaataatcttcgatgcagcttttatcttcaagcgcccataaatacaaaatggcagaagcttcaccgtactctttttgaatatccgcaaaagcgttcacatatgattgcggatcttcccgcaccacttggcagcggctggcggacagagcctcataccggtctccctgagcgataaaaataacgtcaatgtcattgtcatacgatctgatcacagagacggcttcctgctgcttcttctgatcagataagaaagaaatcaccgttttgacttgcttttctccggcagccggcagagcctgttctttaagaacttctctaaaagccattacttcaaattgttccgccggatcactttcatcagccggcgcgttaacgggcgcggccttgctttgtacaggctgctgatgccagaagcgttctttcgcaaacggataagcaggcaggctgatgcgggccggaggacggtctccgtataatttcgcccaatcgatgtccaatccttttacccaaagctcaagcagcttagaatatttccgtttgctgatccaagcgtctatgattgtttccatatcatcatccgccgaaaatacggcaagcatccgtttgttttcttccgtgccgtcacggtgcagtccggcgctgttttgtccggcgataaatccattcagtttttcctcaagttcatgaagtgaatggacgataaaaccgagacgctcttccatcggcacccggcccgtctggagagtaaaggctatgctcataaggtcgctgccgctgtatcttttttcacggatggcgtctctgagctgttttgctttttcagtgagccgttcgctgtttttcgcggacaggacgatgatggcgggctgatctgccggcatctcatcaggctctttgtctgccgtatattcttctatgacgaggtgggcgtttgctcctcccgcgccgaagctgcttaaccccgcccttctcggaagctctttgccgccgatgacgggacgtttccactcaccgagctcctgctgaacggcaaacggcgtatacgcgaaatcaatattcggattcagctgttccgcgtgcagggacggcgcaatttggcggtctttgagctggaatagtatttttgtcagacccgcaatgcccgcggcgctttcacaatgaccgatatttgattttgcggagccgatggcgcaaaactgtttatctgttgtatcctcttcaaatgctttcgttaatccggcgatttcaatcggatctcctaatgctgtccccgtaccgtgggcttcaatataactgacggtgcgcgccgggacgtttgccctttcgaaagcttcttttattaaggcggcctgcgctttcggattcggaacggtgtatccgttcgttttgcctccgctgttaatggtgcttcctttaattacaccgtaaatgtgatcgttatcggcaatcgcccggtccaacggctttaatacgaccgctcctaccccttctccgtcgacaaaaccatccgcgcggtctccgaacgatttgcacgtatcgcctgcggaaagcatgttcatgactgacagattcatataatggatcgggtcggtcactatgtttacgcccccggcaatcgcacattcgcttgaaccgctgtatatgctctcaagcgccagatgaatggccgtcaaagaagaagagcaggctgtatcaacggcaatgctcggcccttggaaatcaaaaaggtaagataccctgttggcaatggaccaatagccgtagcctgtcgggtagtttttgttcatcgcgccggcaaaaacaccgatttttctgctttggcacaggttgtcaggcgtatagccggcatcctcgatactcgcatacgccgtttctaaaaataatcgctcctgcggatccattcgctccgcttccaaaggagaaatctgaaagaacagcggatcaaacttgtccatatcctcaatgaagccgccccatttcgtataaatagagccttctttacctttctcttcatcgtagtaatcctgccagttccagcgttcccgcgggatttcttctatgcagttttttccttttttaatattagcccaaagctcagccgctgtttttgcctgtgggtagcgtcctgaaacaccgatgatggccacgtcgcgaaccgaactttgccggacggtctctttggctgcccgtttttccctccgccgccagtcagtgcgaagcggcttagcaggctgtacagcctgcggttctggtgatgccttccgttctttctgaacaggcgtttgtcccgtcagtttgatcatcgcgtcttttttcgttttgattaagtgagcgacgagcgcctcaatcgtctgatattcaaaaaataaagtgctgctgacttggtccaatacatttcgtaacgcgtttgtcagctgtacgacgacgatagaatcaattccgtatttttcaagcggcgctttcggatcaatttgagccggcggaatttttaatgtttctccgattaacgttttcaagtactcggtgcttttttctgttaaagacgtgtcgcctttttgcaccgttgtttgcgcctgaagttccggcgcatgtgctgcttttggcggagcgatccgttttccggcccctgctttaaacgttttttggcgaacaatgccgttgctttttgccgctataatctgatggcttaattcatgtgccgcttctgccgggaagaagacagaatgccagccttcactttctaacacgcgcttccagctttccggatacaagcccgggcaccccggaatacgaagggcagaatcttcatgcagccaccagccttcaagcagtccgaaagtaatatgcgggaacaggctgtttcccgccatttcatttaagagcagcaaaccattgtcttttaaaacggctttggcatttctcagcgtctggcggatatctttcgtcgcgtggagcacattggccgcaacgacgatgtcgtatgcgcccggctctatgtcctggccggcaagcggcgcttctgcgttaaaaagcttatacgtcagataaggattccgtttgccgtattccgtctccgcatgcacgagaaaagctttcgatacatcggtgtaacagtattcttttatatggttttgatacggcctaagcttttcaaatatgcctgcgcttgtgccgcctgtgcccgctccgatttccagtatgcggatctcggcttttgaatgtttgctgatgttttctttcacataagccgttaatgtatctgacaaggcgctgttaaagtaatccgcgacttgattgtgcttataaattccttcaacaagttccattgaagagtgcgggaacatgatatctgtcgccggcacgtcttcgcgcagaatgtccggcagtgctttaagcatcgtctcggctaaaacagtcatcgcttttgtatcggcgttattgagccattcctctttttcccgctcccatttttgccatagcgcggcggttgtgttttcggctcgcgccgacagtttatatgaatccgcattcccttccagatagccatgttccagaaggaaagcgatcgtttgattgagccattttttaaagtattcgtgttcgggctcatacgctttaaggctttgcggtgtcagcaagtctgcttctttaagctgggcgatcaacagctgatacagaaaatcatcgagctcctgatgttcagcctctctaacaagacgtgcgccgggcggagcgaccttcggctgttgtgaaaagacaagcggctgaggcggataaacggaaatcttttctctttcattcatcccttcgactgcgaccggttttgtcgtatgaatgaaagccgcctgatcaaccggcagcgtcataagggtttcaagcgcctccattgcagcgtccggttcgatcaatcccaatccgatctgatccatcagctgaataaaatccccgtcttcagccgcttcgctgttgccccaatagccccaattcatcactttgaccggacaattccatgtctgatcaagttctttcgcaaatgcgtcactgaaagcgcatcccgcggcataatggctttgtttcacgttatggataaatgccacaagcgaggagaagaagagcgcaaagtcaagcggctcccgtccaaatacctccgccatggacacacttacatcggcttttgcccgcagcaccgatttgaactcttctgtcttcatattacttaagctttgctcagacaaatccattgccgagtggatgattccattcatttttgtgtggcgctcttttatgaactgataagccctctctaaggaagcactgtcggcggcatcggcggaaacatattcaggcgccgggccgaatgcgctgagccggtcgagtttcgcctgtatggaatcattcagtgtgcttcttccgatccaaatgatgcgtgctttgtagcggcggatcatgtattcactccatgcctcgccaagatacccggcgcctccgatcacggcataaaccccgcctgtttggtacagcgtgccgtttttcggcatattgtcaagcggtatcagctgccgctcaaacagctgctgattgcggtacgcccaaatttgaccgtttttcccggcagaaagactgagcgcctcttcgatcggccagctgccgtccgtttctgtgtcaatcatgcggatatgccaatgcggatattctttcgccattgttccggcaagtccgctgactgcggcttgtgacgggtcggcgctgtcttgatccgaaaacggctgggcatttgctgtgacgatgcaccagtccaaacgtttttctccgtaccctaaggcaagtaatgctttcatcagcttgaacacatgaagaacgtttctttcctgttctttgaggctgtccgcactctcagcctgcggagcaagccaaatgatttgctccagttctttttgtccttcaagcatgtgcgtaagagatgtgatatcatccgtacttctgatcggataataggaagcgttcggcagatgttcttttatgcgcgtatgtctcgaacccgttccgccgaatactgccgtctgcttatccgccgctgcttccccggctttttcaagcgcaacaggctcccaagccggaatcagcatcgtatggccgacaggcgcctccgaggtttctccgcccgctgtttggcttgtgtcaagcgcccggacggacgcgcctttcatccggacataaaccgtaccggcatcatcgcacatatcaatgtcaaattttcttacgttgtcatctgctttgctgccttctgtgtaccggatatatgaccagatatgttcaggacacggcccaaacacttccacctcctgcatcgcaaacggcaaagaaagctcgtggctgtctgcatcgtcatgtatcgagcggacaagcagaccgacggaagcgtgaaaagcggcgtccatcatactcgggtgaagcgtatactgttcttttttgtcatgtacggctgctgggagtgaaatacgagccaataatcggtcttctccgatcagcaattgctgtacgcccctgtatgcctctccgtaatccagaccgatcttctcaaaagcaccgtaacattcttccgcagtcacgattcctaaattgcaggaagctttgacagactcgatatcaatctgggcgcttcccggttcggtaatgaccgcttcaccctggctgtgaataaccggatcttcgccgttttctgcctcactgtatatttcataggtaatctcaccattgtcttctgggtaaagggcaatatgtatttccttcggtttgtcttcaatcatgaccggccggacccaaacaacctgtctgagtgtgacgctatggtctttttccgtcacggcagcagcctttttgaccgcctctctggccatttccaaataggcgacgcccggcagtattttttgtccgttgacgacatggtcagataggaaaaattcatctcccgtaaaaagagaggtgaagcgctgctgcgagaaatctgacgtattttcttgtaaaagcggatgcagcactgtgcctgaaaggcttttctcctgttttttctgctgcggaatccaatagcgttcttttgcaaacggataagtcggaacgcttgttttacgcggtttacccgaagcgtacagcttattccaatctactgttttcccttctgcccataactcggcaagccgtatcggatcatccgtctcgggagcggcttcgctcagttccggcagctcggcttgtccgcgccaaagaccggggatgttttcgtttccttttacgaaatcattcagcttttctttcaagtcgcgggtgtcatttacaaggaagacagctctctcctccattgcttcacgtcctgtctgaagagtataagccagttcagacagcaccgtcttttctgaaagcgatcgggctagtttttccgcataggccagaagcctgtctttatttcttgctgacagcgggatgagttttgctgcatcgttctcaggtgcaggcgctttttgttcaggctgaatgtattcttctaaaatgatatgggcattcgaaccggatgcaccgaaggaactgagcccggccctgcgcggataatgtgtgactttaccgttttcttcggctgccggctgcttccacggagcagtctgctgctgtacgtaaaaaggagatccctcaaatttcaggtaaggatttaattccgcagaatgcagtgatttgacaagcgttttgtgatgaagctgcagcgccgcttttgttaacccgctgatccccgccgctgattctgcgtggccgatatttgatttgaccgaaccaatggaacaaaattgctgatcctgcgtcccttgactgaacgcttttgacagaccttcaatttcaatcgggtctcctaacgaagtacccgtgccatgggcttccacataactgacggtccgcgggctgatacctgcttttttcagacaggccttaatgacttctgcctgtgcagcaggactcgggacggtaattccgcttactttcccgacgtggttaacggcgcttcctttaatgaccgcgtaaatgcggtcgccgtcttgttcggctttttccagcggcttgagcaagaccgcaccgactccttctccggaaacgtagccgtccccgccctcgccgaatgtacggcagcggccgtcacttgagtgcatgcccacgcttccgtagctgagatatttcgccgggtgcagcgacaagttcacccctcccgcaagcgcggcctcacattcgccgcggcggatgctttcaatggccagatgaacggcggtcaatgatgaggaacaaacggtatccaccgcgatgctcggcccgtggaagtcacaataataggacactctgttggcgatctgcgcataattcagtgaaaccggaaaaggatcagtttcagataattgttctgcgccgattaaggaataatctttatgcatcacccctgcaaatacgccgatcggatgctgtttttcccctttattccccagcgtttcaggcgtataccccgcatcttcaatcgtttcccagcatgtttctaaaaacaggcgctcctgcgggtccatcgtttccgcctcacgcggtgagattctgaaaaactgcggatcgaagcagtcggcatcgtcaatgaaaccgccccattttgatactgtttttccagacggggacgttacgttttgatatgttttccaatcccatcgggacttcggaacttcagtgatgcaatccgtgcctgccttcaggttttcccaaaactccgccacacttttcgctttcggatagcggccggccattccgataatcgcgatgtctccggtgtttttatgatgttctggcgcgtccggtgcttcagcttcagaccgttgtggttcggctgcacgttccgcacattcaaatgaaacggtctttttcaaaaaggctgcgagttcttttatatttgtatattcaaagagaagagtgggcgcgaggtccgcacccgtctttttactgatatcctgtacaatctcaagcaaagaagatgaatccagcccaagctcgtagtatcctgcaagaacgtccagcgtctcccaaggctgcccaagcttatcagccaaaagcttctttaaaaacagaatgatgtctttttcatctgcgctttccggctcagttgcagcctgttgattctgttcggctgtattcgcgtcttcttcgagccgaaccgcttttcccgtaatgtttttcagctccgccaccttttgtccggatcggctgaagtactcgatcgtcatcgttgtgagttctttttcctgacggacgccggaagcggcgatacgcgccgtgcactcagattgcagcctgtcggcggccgtgaacgattcataatataaaggcagatgaagccggtttgtttcagaaagcaaaccgctcgccccgattccgctcgcatccaaaagtgccggatggaataaaaagaaatcttttccttcttcgcaagaaagctcagccagcattccgccttctgtttcgtacaatcgtccgttcgatttcatcatgccggaatgaaccaagtcatgatccaggcatcggttatacatgtcatcaagattcagagatctgcctgactgcttcacatcgccgaaatcaatggtttcgtcaaatgtcacagcgtctcttttcaccatttcagccgtcgcatattgtatattgtctgacagctcgtcaccttgctgtttctgccctgaaagggagatgagccactttccatctccgctatcagaacattgaatggtcagaatgatcgcagccgtttcactgacggttaaaggctgataaatcgtaacgtgcttcaattcgagctcattgtatacataaccgtgttcctgaaaaacctgataaatcaaatcgatataagcaagaccgggcaataccgcttcaccaaagaccatatggcccttcatgatgggatgatccagtgagatattgattttttccgatatcattccttcccactcctctctcatttaaatgctttccagaacatttttttcgcaggaagctcttgtttctccgctagtacgtcaggttcttttaccagagccttacgtcttaatgacggtaccggcagcggctttcttttcattcgggtatctttttcttcccaagcttccagaatgacgtgggcgttcgttccgccgtcggcaaagcagttgatggctgctgacggtctggctgcatcccattcaccggctgttttatgaaaatgaaaatctgtctttgttatatcaaaatgcggcatcggttcatctcctgagaggaacggaaccgtttgtttatgcttcagcattaatacgattttaatgaagcttgcgatgccttctgcgcaaagcggatgcccgatgttcggcttaattgacccgatgccgagcggaacatgctgacctgagcggtatacggattgaatcgccttcagctcaagcaaatcagtgaccgcggaacccgatccgtttgcttcgatataactgatgtcttccggctttttgccgcttttgaaaagcgcgctttgcatgacgtctttttgcgcctgcatattaggagctgacgggcctgccgttctgccgtcattgttcatggcggcggccttaatgaccgcgtgtatcgtgtcgccgtctttttgcgcctggcttactgtttttaacagcaccatgccgacgccttcaccgaggacaactccgcctgaacgcttgtcaaatacgtgaaatgccggtttttcgtttaacagcccgcgctcttggaacatccggtgcgccgcatccgtgttcagcaggctgacaccgccaactaccgccgctttgatatcgccgcttctcagtgcctgaacggccatgttcattcctgtcaaagccgatgaacaagccgtatcaagcacgatgctcggcccgcgcagatcaaaaaattgcgaaacgtttgccgctaaataattctgcccgcccgcaacgatcgggttgcgggtattcgcaagaatttcaggatcaggctgatgctggctgcggcctccgatatacacaccggcttctatgcccttgatttcttcacgggtatagccggcatggcaccaaagtttcaagctctcttccaacaccgccaatgcctgaggatccatcgctttcgcgtcgttttccggaatgaaaaagaattcggaatcaaagtgatccatattgtcaatcaatcccgcaacgtattgatttgcatatccgaaacgttccgccgggactgagccgattgcggacctgccgcgtctcagcaagtcccaatattgttctaacgattccgctcccggaaaacggcagctcattccgacgacggcaatgtcttcagttacggcatcacgcttttgttcagtatgaaccgtttgtacggcagccggaaccaagatttctgtatcaggttcctccctttctgcaagcagcggctgtccattggatacaagccattcggcaaacgcgtcaatcgtcggatgttcatataaaacagacggatctaagtcctctttgagcgcttgattcatttgctgtaaaagctgcgctaaaatgatcgaatcaaccccgtaatcctgaaacggttcgtctgtttccagttcttccggagcgattttcagctcatcggaaaacagtttcacaagccacgccttcgtatcaataagcagttctctgtctgaatgtttttcagcggctttgccggttattacggctttttgtgttttctcttgacagagcagcctgtcaggatgccattcgctccgatcaacgatagccggcagaacggacgggcggatgttttcagataaaatacgatccagcaagtcaagtccttccgcgttggacagtcccagcagcccggtctgcttcaggttttctgtgcggacttcacccaatccggtttccttccagttcggccattgaatgctgactaacggatattgatgctgatgagccgccgcgaaataatccatgtacgcatttgccatcgcataatccgactgtcccgccgcgagcgccggaacgactgcagatactgaagaaaataagacaaaaaattgcaaaggatcatttgtgaaaaggctgcttaatgtttgaagccctgcgactttcggttccagcacttcttgtatgtcgtcggcagtctttctgataaatgccggatttactgaattaaccgatcccgcacaatgaatgacgccgccgatcggtcccatcgtgcgccggatcgtttcaatttccgctgccgccgcatcatgatcagacaatttcagactgatcaccgccacttgcactccttttgcttcaagctcttcaatcgcccgtatcttctctttcagcctcgtcttaacggctgaacgtttatgacggggaggaatcggctccctgcctgtcagcactacttttttcacgccgtgtttttctgtgaaatggcgggcgcataagagacccagtcccctcgtgcctccggtaatgaaaagcacatggtcttcaggaaacggtgcgggcttatgttctgctcgcttcccgcttggaatctccctgaataaagcacggtatctctgtccgtttcggcggcagatttccggttctgtgcagtccgccgaaaattcatctgcaatctgtttggcaagcgtctgctgatccgtatctgtatcggcatccatgtgtctggacgtcacgttttgatactcattttgaagcattctgtacaggccgctttttgccgctcctgcaagatgaatcgttttctgctgaaatggttccaagccttttgttacatatagcagcgtcagcggccgcgcttgccggcggcttgtatcaatcagagtctggagccggctgatcccttccagtgaagggtcttcgtctccgcatcccgtcagatcgattgcgccatctatgtgattccaatcgctagctgcagtgtcagccgaatcgaccaggagaatgaatgagtcagcgaaatgctttgcagtctcttcggctagctccgctgttcttgcatcagccagaatcatgaccgtcctgccgcttttctcaccggccgaatcgatctcacacggaacccattgcttttctaaaagcacagcctcgcgccggtcttctgtttcctgcggtacggctttcggctcaggcagccagtacggctccttcgcaaatgggtaagccggcagactgattctgcggggtttttcgccttgatagagtctgtcccagtccatctggagccctttgacccacaattccgctatttcggcgtattttttcttatcgaaccatgaccttacaagctgcttcaggtcatcgtccgtttcaaatgctttgatttcttttttagccgttttgatatgggcttcatatatcccttcacccgtatttccgtttacaaaatcggttaaacggctgatcagttcttctctcgaaccggctgtaaccgcaagacggtaatccatcgcatcacgcccggtttgaagcgtgtatgccatatctgaaaggttgatattctgattggcttttgcaaattcgatcacagactcggcataggtttttacctgcagcgcttttttcgccgacagcacaaaaatgtttgtctcatcaggcttacggcttccccggtctttcggctgatactcctcgataacgagatgagcgtttgtgccgctgtagccgaatgagctgacacaagcccgccgcggtgctccgcctgtttcccaaggtttgagttcggtattgacaaataaaggcgagtcatcgaaatcaaaatgttcattcggcgtgctgaaatgaagggtcggcacaagctgctgatgcttcatcgacagcagaaccttctggacgcttgctacacctgccgccgccgacgtatgcccaatattcgatttaaccgaaccgatggcgcaaaattgtttgcggtccgttttttccttaaatacagaagacagggcttctaattcaatcggatccccctgctttgtgccggtgccgtgcatttccgcataggtgatgctctcagggtggatgttgtgcgcttcatacacttggcgctctaaatccatttggcttttcgcgcttggtgcggtaatgccgttggtttttccgtcctggttaattccagatccgataatgactccgtaaatatggtcttgatcggcttccgcatctttcagcctcttcaaaatgagcgcccccgcgccttcgccaggcacaaatccgttcgcactgttatcaaatgctttacattggccgtcaggagacagcattcctgcttcacacatgctgatgtatgattcaggcgttaaatacaaggtgacaccgccgacaagcgccatgtcaatttcatgattcaacagcgcctgacgcgccaaatgagtcccgacgagagatgaagagcatgccgtatcaatcggaatggccggccctttcaaattgagataataaggcagacgtgccgccgcgatgctgaaactgttgcccgtcgcgcttcctcctgtctgatgtttgtttaacatcatgccgtattcattgttcataatccccaaataaacgccgcaatttttcccgtttaattcttttgagctgtaacccgcatcttcaaaggctttaaaaccttcctgtaaaaatatccggtgctgcgggtccataagttccgcttcagacggagatatattaaagaacagcggatcaaactcttcaatgccgtcaagcataccgattgatctgcagtatactttgcccttcttgtttaaggccggatcatagtatttgtttacatcccagcgggaaagcggaatgtcgcgaatggcgtttttcgcacgggctaagttgtcccaatacgtctttaggtccggcgcatccgggtactttcccgacatgccgacgatggctatcgcgtccgctatctcgtctttatgctcccgtttggcctgcaccggttcaggttccttttgaatcgttaatctctccggctcggcaggtgttttctcctgcggggcatgttgctgcgtaagcggctttggacgtacgggaaccgcctgtttttttctgccgcggacggacggctgcgtacgcagaaaatcggcaaattgacggattgtcggataatcatacactttcgttacgttacagtccgtgccgtaccgtttattgacggcctttatccattcaagaccggtaatcgaatccatacccaagtcaataaaggcctcatcaatatctacttcatgccgctccatgtacaatacatcagccagtgcttttgataactcgtcatgcaccgcttcaatcggttcttccggttcggcggaagctgccgtttcagacatcgcctccagaatatccgcttctgcttgtgtcacatgctgcttatgagcgtttaaaggctgcagcatgatgtttgacggttttttcacggcctctgatttctgcggttcggttgcttcctcaaggatcggttctgtcccgagctctttttgcaagaaagccgcaaactggcggattgtcggataatcatatactttcgtcaccgtaagggacgtgccgtatgctttattaacagactttatccattcaagaccggtaattgaatccatgccgatatcaataaatgtgtcgtctgcgtcgatatcgtcggcatccatatataaaacgtctgccaaactttcggtcaatacggcacttactttttcagcggaaaccgccggacgggaaacagactgtacggttcttttcggtttcgcgccgctcaaaggctgcagtgtaatatttgacggtttttctttgacagtctcctcgtgaagagttgttacttcaatgaccggttccggggcggccgccggtgcgatcggcgcagactgtgtttcggccggtcttttgacagctgcatctgctgatatgtcgatccaataacggtcttttgcaaacgggtaggccgggagactgattttttgcggtctgcccatttgatacagcttatcccaattcagcggaaggcccttcacccaaagctctaatacctttgcggctttgcctttttcaagccacgcctcaatggttttttccatgtcctcatcagccgcaaacagcgccatcgtgtctttattctgtttgacttgtccccggtagagctggtcaattgactccttgccgcccgtaaattcgtcaagcttctcttcaagctcgcgcaaattgctgacaatcattccgagacgctcttccatcggttcacggccgatttgaagcgtatatgcgatccggctcagatccgcttcccggtaacgcccgctccgcagtgcatcaagaagacgtttcgcccgtttttgaagccgtttctcattttttgcggaaaggacgatcatcgacggatgaggcgcggcaaaagccgtctccttatcctcatcagcggaatattcttcgatgacgatatgagcgttgacgccgccggctccgaatgaggaaagccccgcggttctcggcagttccttatcatttatgaccggtcttttccactcttcaagcgtctgctgcactttaaacggcgtagcgagaaaatcaatattcggattaagcgtccgggaatgcagtgacggtgctagctgcttatgtttcatttgcaggagcaccttcgtcagcccggcgatgcccgccgcgctttcacagtggccgatattggatttcgctgagccgatggcgcaaaactgtttatcttgtgtttgttctgaaaaggcttttgtcagacccgtgatttcaatcggatcgccgagtgaagtcccggtgccgtgggcttcgatgtagctgaccgccctcggatcggttcccgcgtcttttaacgcctgtttgatcaccgcggcttgggcgttcggattcggtacggaatacccgtttgtttttccatcatggttcacggccgttcctttgatcagaccgtaaatatgatcaccgtccgctttcgctttagaaagcggcttaaggagtacggcgcccactccttcaccgggcacataaccgtctccgccttctccgaaactttcacatctgcctttgcttgataaaaatctgttctggccgagcatcaaatatttattcggatgaacggatacattgacgcccccggcaaatgctgcttcgcattccccgttccgcaagctttggcatgccagatgaatggctgttaaagaagaagagcacatcgtatccagagccatgctcgggccgttaaaaccgaatacataggaagccctgttcgcaattgatgacggatttccggtcagcgcaagcgattttccgcgcgcctgttcttcggctccgtaaagctgatattcctcgtacatgacgccgacgtaaacaccgacattggcgccaagcaaatcacccgatttttccgtgagctttttgcgcgtgtaaccggcatcttccatcgtttcgtagacacattgcaggaataaccgctcctgcgggtccatcaattttgcatcccggggcgaaatagagaagaattgcggatcaaatttgtccacgtctttcaaaaatcctccccattttccgtacgtcttgccttctttatctttatcagcgtcgtaataaagactgtgatcccagcgatcgtttggaatttcggttatgcagtcagtgccttcactcaaattcttccaaaattcctgaagattttcggcctgcggatatcgtcctgatataccgataatcgcgatatcttcacgctctgtcagctgctgattttcccgcgtttccggacggacttgcgcaaagccttttttgccttcattccgtttgaaaacgggctttactttctctttctcagacagcgcaggtttggctgcaggggcttcttctgttttcatcccggtcacttccagcagcgtgtcccggtgtgctttcataaaatactgcgccagcgattcgatattctggtactcgaaaaacaatgtttttgataatgagccgaagctcttttccagccggcccgtcaaatgcataatcataatcgaatcaattccgtaatcttccataggcgccttggcatcaattttgccgacaggaagtttggtcacttccgaaagcacttgtttcaagaaatgctccgttttttctgcaagcatgttctctccgcctgctgtaagacccgccggttcttcggtttcgctgcccttatccggctgatcatccgctgattttttcagaaacgcccggatttttgcggcgtagccttccgtcaccatgacttgggatgtgtttgccgcccacccgcggtataaagcctgaatgccgttttctgtttgcatagggaccatgccgctttcttttgtcagcatggcttccgtttcagcatcaaccgtcatgccgccgtctttccaaagcggccagcagattgaaagggtgtgtccatagcgttcatttcgggcttttttacggtttcttttttcactgaaggcgttcataaacgcattggccatcgcataatcagcctggcccgcgcttccggcgcttccggctccggaagagaaaagaatcagaaaatcaagctcaatgtcctttgccgcttcatcaagatgaaccagcccggagactttcggcgccagtacatcacggatttcatctttgtgttttttcagaatatagttgtcttttatcgttccggcgctgtgtatgataccgtttaatccgccgtactgccgacagatgtccgctgtgagcgattgaacttcttgtttttccgtcatgtccgtttgtttgtacacagcttgcgcgccgagatcggacagttcttgaaactgggcttttttacggttatccaacagagaacgccccgttaaaataagaacggcgtcttttgcatgccgggcgatttctctggcgaataaaaatccgagtccgcccgcaccgcctgtgatcagataaacacctttatccttccacggcttttcggcgccgaactgttcaagacccgtttcctgccattgtgccgtatagcgcctgccgttttcatagcgaatatgcttgtcatcaggatgagcgctgcattcacttacatatcgggacagaatgtctgccttgacgtccggctccaattcaatcagctggccggtcaggttcgggttttcaagcgccgctgttttcaaaagccccgttaagccgcaaaggagctgcgtatccgcttcttgaggcacgacaatctgaatgagttcgcgcccgccggaatttgaagcgaggattttcttcacttcttcgaacgcctgaagcgcacaagcttcaaaccgttcgtcttcactcttatgctgatcacggagcacatgacagctgaagtctgtctgtatgctgttcatttgatccgtaaaccggtcagatatcatcacgtgacgggctttgaaatggatcggcgcttcttcatgtacagcggtcttctcttcccatacgtgttcaaaatatagtgtatctgttttatccgtttcaatttcccgtgcggaataaccagtcattttcacacatacattgccttgttcgtcacatacatcaatatccagcttctgcacggcatcttcaggcttgctttcgccgctgtacgcaatggaaacccacatattgcttttacagcttttcaacacatcaatctgttcgagagcaaacggcagcatcggccgtatgtcagtcccgtctctgtcaagcattaacccgattgtcgcgtggaaggccgcatccaaaaggctcggatggaggacaaactgatcttttgtatgagaaatagatgacgggagtgagagcttcgcgagcactttgctgtcttttgcatagatttccgtgaccgctttgtgagcatccccgtattcaatccccatctgtttgtatgcctgatagcaagcgtcaggtgtgatcagacggcgtgactctcttaatttgtcaatctcgattttggccggttcgcccgttcgggcaaacgccgcgcttccttgcgcatagagaacgggctcttgttccgaggaagccgattcactgtaaaccgtaaatcccatctccccattttcttcgtcataaagacggagatacagttctgcggactcatccgccgctgtaaacggacgtatccatacgacatgtttcagccggactgttccttcttccttcgtttctgccgcatgttccacggccgcccggaccatttccagataagccgcgcccggtaacgtccgctcgtttttgacgacgtgatctttcaggaagaattctccgccgctaaacgaggaccgaaaacggacgcctgacatgtttgatacattttcatgcaggagcggatgcagcatgcctgcatttttttgcggcagcgattctcttttctccgccttcggcacccaataccggattttttcaaacggatatgtcggcaggctgatccgattcggtttgttttcaccgtacaagagattccaatccatcgttcctccgccggcccacttttcggcaatcatctccagtctcccggaagaaagccatttatgtatcaagtccggagcaagctctgcctgtttgcttttatcggctcggttccgccagcacccgctgaccgttttacccgccagaaagccttccagccgctctttgagctgtgtcatatcctgagcggtgaacgcaacccgctcctccatctgttcacggccgatctgaagtgtatacgccgcatcctcaagcggcaggccgggatgaataaatgcagacagcttcgcaacgtactcttttagccgttcttcattccgggctgaaaccgggaaaatgaatgtctgttcttctgccggttcagcatttgttccgtgtgattcttcagggataaattcctccagaatgagatgcacgtttgaacctgtcgccccgaaagagctgatgcccgcacgccggggatatacggtttcggttccgttttccgtcactgatggctgctgccatgcttcggtatgatgctggacgtaaaacggtgattgttcaaaatctaaatacggattcagctcctccgaatgaagagacggcaccaaagttttatggtgaagctgcagggcaaccttgcttaagccgctgatgcccgcagccgattccgcatggccgatattggacttcactgatccgatcgaacagaactgtttgtcctgtgtgtactggcggaacgccttgacaaggccttgaacctcgatcggatcgccgagagaagttcccgtcccgtgcgcctcaatataactgaccgtgcgcggatcgatgcccgctttgtccaggcattcttcaatcaaatcggcctgcgcgacaggactcggcacggaaattccgctcactgtccccacgtggttgacggcactgccctttatcaccgcataaatccggtctccgtcttttaccgcctctcgcagcggttttaataaaacggcaccgattccttcagccggtacatagccgtctccgtctttcccgaatgtatgacaaaccccgtctgttgaaaacatgtcccataaaccgtatgtcagatatttattcggatgcagcgacaaattgacccctccggcaaccgccgattcacattccccgcgccgaatgctttccgcagcaaggtgaaccgcagtcagcgaagatgaacagaccgtatcgaccgccatgctcggcccgtgaaaattgcaaaaatatgaaactctgtttgcgatttgcgcataattaagagaaagcgggaatacatgatcttcagaagaagcttcagccccgaccaacgtataatccttatgcatcacccctgcgaagacgccgacgcgctgtctcttattccgtccgcgcgcctctgcgagcgacttcggcgtatatccggcatcctcaatcgtttcccagcatgtttgtaaaaacagccgttcctgagggtccattgtttcagcttcccgcggcgtaatccggaaaaattggggatcaaagcaatccggatcatcaataaatccgccccattttgaaatgctctttccggaaggcgactttacattttcaaaccggcgccagtcccagcgagactccggaatttcggtgacacagttttttccttctttcaggttttcccagaattcatgaatattttcggcctgcggatagcggccggccatgccgataattgcgatatcttcatctagcggcacactgcttttccgcctgttttctgtttgcggctcaaccggcttctccatctttgccggagacgcgctgaaatggctcccgtactgctcagtcaggaaagctgccagctctgctgccgtcgtatattcaaacagcaaagtcggagaaagggtttcgccgattttttcgctgatcgtttcgacgacgtcaagcagtccggacgatgtcagccccatttcatagtagccgacttgagaatcaatctgttcaagcggcttgccgattttttcagccatcagattcatgacataccgttccgcttcctcatgcgggtgtccgccttcaagcgatgccgcaacttccggtaaaccggctttttcaggagaactctcagcagtctttcgttctgtattgatcagctcggcatcccgcacgagcttgcttgtgaaatctttcagctcggctactttccggccggatgcgttaaaaaactccagtgtaatgtaaatgagctccttttcctgccgaagcgacgaacgtttgattctcgtgatgcagccgctctgcaaaggttcggaagctgtaaaagattcgtagaaaagaggcagaaacagcctcttttccccatttaacagcgatgagatcaataggtttgcgccgacgccgcttccgtcaagaagagtcggatggaacaaaaaccctccggcctgtcccatcgcgtcttttccgagcgatacatcaaaggtgacgccgtcccgctcctcaaacacttctccttccgctttcatatatccgctgtgaaccaattcctggcttctgcattgtgcataaagctcatttaaatcaatggtgcgttgcgcctcgcgtttgacagagtcaagatcaagcgtttcactgaaaattgcaggtgctgtctcgtgcatttccgctttgacgtaaatacgttcttccggctggactcgtccgccgctgacctcagccccttttgcggtaagtttccagcgcccttcttttacctttgtacattcaaccgtaagcttgacggcgctgtcttctttcgcgataagcggctgatatatggataaatggcgcagctgaagcccgtcgtatgaatagccgcgctctttgaaaatctgataaaacatatcaatataagccaatcccggaaggactttttgtccgtaaacgtcatgatgtaaaataaacggatttttcagcgataaagtgatttgcttattgaagttcttcacgttaaacctccacttcataggtatcccagatgtttgccgcagctttttcgttcgtttcttctttgctgtccggcgaaatcagccgcttatttaatgcaggcggtgttaaaggatggcgcttgattcggcgcccttcgtcttcctgccacgcttccacaatgacgtgagcgtttgttccgccgtcggcaaagcagttaattcctgccgccggcattggtgacggccagtctgccagagtgcggctgaactgaatattggccttttctctatcaaaatgtgtattttcatgctcgcctgataaaaacgggataaagctcttttctttcagcatgagaacaacttttatgaaacttgcaattccttcggcgcaaagcgggtgcccgatgttcggtttcacagatccgattccgagcgggccggcgtcttttgaacggtagacggattgaatggccttcagttctaacagatccgtcacgaccgtgcctgaaccgttcgcttcaatatgagtaatgtcttccggctgttttccgcttttttcaagagccgtcttcatgacggatttttgcgcttccagactcggcgtagccgggcctgccgttcttccgtcattattgacggatgccgccttcactacggcataaatagaatctccgtcttcaatggcctgagacacggtttttaatagaaccattccgacaccctcgcccagcacgactccatcggcgcgttcgtcaaatacatggaacgactgcgctttacttaatatgccgcgctgttcaaataatttatgggtttcttctgattcaaacaggctcacgccgccgacgacggccgcttttatttctcctgttacaagagcctgcacggccatattcattccgactaaagcagaagaacaagccgtatcgaggacaacgctcgggccgcgcatatcaaagtattgagagagattggcggccaaataattctggcccagcgcgacgatcgggtttttcgcgtccagcagtttctcttcacccggtctgtgacggctgcgtccgccgagatacacacctattgcttctccctttatctcatccggcgtatagcccgcgtgatgccacaggttaaggcattcttccagagcggccaaagcttgagggtccattgcctttacatcttcttcagccagtaaaaagaagtctggatcaaattgatgaattccatcaagcattcccgcgtaataaggcgtcttcaacccccatcgctcagccggaacaggaccgatagccgaacggccttcagccaaaagcgaccagtacgcctctaaagaagccgctcccggaaaccggcaggacatgccgacgaccgcgatatcttcccggtgaatctgttttccggccgcctcttcttgcaccttaacggcttgtgtttcaatcaacggctcagccggcttcttcttaacaggctccgccgtcgccaaatcaaaccgttctgacaaaacttctgtatatccttcgagaagccaatttgcgaaagattgaatcgtcggatattcatacagaatggacgggtcaagcgatgccgagagattccgattgatccgctgcagaagctgagcaagaataatggaatccactccgtaatcttggaataatacgtctgtctcaagctgatcctggtcaatccgcagctcttcagaaaataattctttcagccattcttctgttttccttgttaattgagcgttgtctgcggcagtataagcggttttttccgccggttttaccatagctggactcattggctgatcctgcctgctccgccgcaggaatcgctccggcttccacagcttaggattcagaacggccggcagcaccgggccccttgctgattcaagaagtatgccgtcaaggagctgtaatccttctgcattcgtgatgctgtatagcccgctctctttataagctttgttcgttacttcgcccattccggtttctttccagttcggccactgaatgcttacgatcggcagctgctctttgtatgagtttgcaaaatagtccatatacgcattggccatggcatagtcggcctgtcctgccgaaagcgccggtatcgcagctgacacggaagagaacaagacgaaaaacttcagcggctcttcgctgagcacactgtataacgcctgaagcccgtctactttcggctcgagcacgcgctgtatgtcttcatcggtttttctgatgaatgcgagcgtctctttatcggtcacacccgcgcagtgaatcacgccgccgataggtccgagcgtctgttttatctgactcagttcctgtctcagcccggcttcatcagctaacggaactgacaaaaccttcacttgtacacctttggattccaagtcgagaacggcttcaattttcgcttttacagaagccgtcaccccattcagtccgcccgtccactcacttcgcggcggaagggtctcgcggcctgtaagcaccagttttttcactccgtaatgttcggcaaaatggcgtgcgcataaaagaccgatccccctcgtccctccggtgatcagaagcacatggttgtccggaaaatcaattctctcgccttgcatattcatattttctgagccgcttaatacagcgcggtagcgcaagccgtccctccggcaaacttccgcgtcatcagtgcgagcatgaaactcatcggcaatctgcttcgccagtttgtcatccgaaagcgctccttcaaggtcgagatgccttgaagacaggtgaccgtactcgcatgccagcattctgtacagaccggcccgttttgctcctgttgtttgattggcttctttatctagtgactcaaggtctttcgtgacacaaagcagtgtcatcccttctttatgcccatgctcaatcaattgctgaagccatttgattccggccatgtcttgagaatcttctttcgctgcgccgaggaggtcgatgactccgtcaaacgcctgccagtcatattcaccggtaaggtctgatgcggtgatgatacggtgattcggcatgtgcgctgcgatctcttctgctagattgaccgtgtccccgcctgtcaaaatcgcaacggaacgtgggcacggttcacccagttcgagcgggctcagttcccattgtttcgtcaaaatacgtttcatccgttcctctgtatggaccttctttttgtcaggattctcaggcacccaatacgtgtcttttgcgaacggataagacggaagactgagtaaacgcggcgtacccttttcatacagccggttccaattcaatacgccgcctttcacccatacctctgccagcttggcgaattttccttttttaatccaggcgtcaatgacgaggtccatatcttcatcggccgtgaacaaggcaaacgtatctttattgcggtgagactggccggtatacagcccggcgatgtttttctcatttttcgtaaatgcttccagctttgtttccaattccgccatcgtcgctgcaagaatggccaagcgctcttccatttcgtcccttccggtttgcagcgtataagcgacgcccgccaagtcttgatctgtatacggcgtttgacggatcgctttttgcagctgctgcgcctgttcaaacagtttttcttttgatttggcggacaaaaggatgattgccggattttccgggctgtgctcaggctgagcggctgctttcgggacatactcttcaatgatgatatgggcgttgaccccgccgatgccaaatgagctgaccccggcccggcgcggaacagcatttccgtttctatcttttgctgccgtccattcctgattttcctgcacgatgtagaaaggactgtcatcgagctgaatgtacggattgatcgtttcgcaatgcaggcttttcaccagcgttttgtgcttcatttgcaaaagcactttcatgacgcctgatactcccgcggcaagctctaaatggccgatattgcttttgaccgaaccgatgccgcagcggtgaccggagacttcgggctcttgatttgttttcgccagctcgtgaaacgccgctttcagaccatttatttcaatcggatcgcccaattccgttcctgtaccgtgcgcttcaatatacgtaacggtgctcgggtccactcccgctttccggtatgctttcaccaataaatcagcctgcagtttcggattcggcgaggttaacgtattcgcccggccgccgtggttttcagccgtaccgcggatcacaccgtaaatcggattgccgtcacgttctgcatctgtcagtttcttcagcatcagaattcccgcgccttctcctctgacatacccgttggcatctttggagaaggttttgcattttccgtctttgctgagcatgcctgctttgctgtagctgatatgcgcttcttccgtcagaatcgtgttgattcccccggcaatcgccatgtcgcattctccgttttctatagcggataccgcccggtgaatcgccacaagcgagcttgaacatgccgtttcaatcggctcgctcggcccgtgaagatttaacaaatagctcaaacggttcggacctatggaaggaatcatgctgcctgtcgccgcatgtccttccggcgcaagacctgcccttatgaacaaatctttataaccggtatttccggttccgataaagacacccgtatttgtaccggaaaggctttccggcttacagcccgcatcttctatcgcccgccatgcataagtcaataacagccgctgctgcggatctaaatattgggcttcccgcggtgaaatcccaaagaacagcggatcaaattcagctattccgtcgataaagccgccccacttgatattcgttttattcccttcaagattcgggtcgccatcaaacgcttgccaatcccagcgttctttcggaatggttgtgatcgaatcctttccttctttcaaattgcgccaaaattcctctatatcctttgcacccgggaatcggccgctgattccgacaatggcaaccgggtccaagcgtcgcggctcttgtgtcactgccgcggcgttcattaccgttgcgaagcgctttttccgctgcattttcggtttttgggcttttggctgctcttttttccgagactctttcttcttttcgccgaaacggcccggatgctcttttgccaaatatccggcgagaccgctgatcgttccgtactcaaagaaaatcgtcggcgccagctccagctgatacgcttcatttaattgattcgtaaagacggtaaacgatacggaatcaaaaccgtattcactcaattccgtatctgtctcaatgtcctcacggtcaacttttaaaatgccgcttaccatggctttcaaagcggtgtgaagcgtttgaagagattcttctgcatcgtgtttttcttccggctgagaaggaaggccggcttctgcctcatccgtcaaatactctgctaaactgcggatcgtcccgtgttcgaagaagatcgtcggcgccagctccagctgatacgcttcatttaattgattcgtaaagacggtaaacgatacggaatcaaaaccgtattcactcagttccgtatctatatcaatctcgtcttggccgacttttaaaattgaactgaccaatctgataagcgcaccgtgccatttgtctcccgaaacggcggatacaggctctattttctccacctgcggcttttcagtttcagaaacggacaggaacgactgttttaattttgctgcgtgtccttcagctgctaaaagctgcggcttttcctgagccattccttcataaaatgcagccaggcctgacgccttttgaagcggaaccatgccaaaagcttttttcatcattctctccgtctcgtctcccgcctgcataccgccatctttccacagcgtccagttaaaggcgactgtttttccgtgccgaaggccattctccgtaagggattgcctgtaagcggcgtatgcatccataaacgcgttgccggcggcataatcagcctgcccgacgttgccgagaacgccggaaacactggagaacaatacgaaaaagtcaagattgcagtctttgctggcttcatctaaataagcggttccattgactttcggatcaagcacttccctgaactcttccttcgttttttgcagcaggaagcggtcttgtatcactcccgcagcgtgaataattccgttaagctttccgaattccgccgtaatctctttgatcagcgcttcattttcccgccggtccgccgcattcagttttttgtagacgacatttgcgcctgagtgctgaagcatagcaagctcacgctgtttggcttctgccagatttgagcggcccgtcagaatgattttcgggtgttttacgcgacctgcgatttcttttgcgaacatcaagcccaggcttcctgcgcctccggtaatcagatatacgccttcgtccttccagacgatgccgccccctgcgggatgcatttcttcccaagccttcacataccgtttttctcctttataacggatatgtttatcctgcggccgatgactgtcgtttttcagtttttgagcgacagccggcatttcgccgattgattccatttcgatgagctgacagtcaagttttccgtattccagctcggctgtttttaacaaacctgttaaccccgcaaacaattgctggctgccgtctgctgaaataacggtctgaatcagaatgcggccctgccttttttcgctgatgatccgccggatgtgctcggcgactgtctgcgcatagctttggaagcgttcagcggctgtttcaccctcaccttctgcaatcagcagttcggcgtctttcaggccggatgccgcttcatcttttatacggcaggcatcttcacaaagtatgatcaaatgctcatcagcatggacagaagctttctcggatgcagcggcttctttccagaccggtgcaaacaagaccttttccgagcctgatagccgctgagccgattctgcatcgccttcaagcactctcgtagagaatcctctcaccttcacgcaaagcgctcctgtttcgtcgaacaggtcaatgtcggctttctgcacggaatcaccggtttgatatccttcactgaagcgtgcatgcgcccgcatagccggtgtgcatgctttgatgacttcaagatattccaacgcaaacggcagaatcagcttttttccggaaaactcctgcataatgcagatcgtcgccgtctgaatagctgaatcaatgatgctcggatgaagcgtaaattgtccgttcgtgtgagaaacagaatccggaagctgtatgtccgaaagcacttctttctcgccgataaaggcggacttaatgccttggaaagcctttccgtggaacatccccctgctcctgccttcccgataaaaggccgccggatcaagaatgtccgctgtgcacctgttttgtatggcagaaaggtcggcctcaggctctcgttcagcctttatgatctcggcccgtccttggctgtgcagcacttcttcgccgtcagcgtttacgctgtaaatgtcatatgagatgatgccgtcctcttcagggaacagcgcaatatggacttggcgctcttgttcgtgaacgacgatcggcttcatccagacggtatgatggagcgttattctgtcttggtcttttaataagccgccaagcgcccgttttaccgcttcataagacatttccaaatatgccgctcccggcagcaccgctttttccctgaccacatgatccttcaggaaaaattctgagcctgtaaaccgtgagctgaaccgctgaacggccaaatctgacgtattttgctgcacgagcgggtgtaaaactgagactccggtgtgtgcggctgatgtgttcttttctgcttttttcggccagtacggctcctttgcaaacgggtagaccggcacgctgattcgtttcggatgcttgtctttgtaaagcttgtgccaattgattgcgacgcctttactccacatttcacagagcttcggtccttttcctttcgcaagccatttctcaatgagttcagcgctgtcatcatcatcagaaagccaggcaatatctttcgcctgctgtttttctcctctgaagcagcctgttacagccggcttatcattgataaaatcggcaagctgccgcttgagctccgcaatgccgcttgtgataaaggccgcgcgctcttccatcgcttcccttccgacttggaacgtgtaggcaagatcagcgaggtctgtgtccgtttttctttccagaaaagccagcagctgttttgcgtactccttcagacgatctttttttctggcagacaacggaatgatgaacggacccgcagcgtctgctgcttcggatgcatccggatattgttcaaaaatcgcgtgtgtgtttgttccgccaagaccgaaagagcttaaagccatgcggtgcgctctgttctcacgggttaactctttcttttcttccgctacgtaaaacggagagtcttctaaatgaagattcgggttcggctctttgtaattgatgctcggcgcgatttcctgatgatataagctcatgataaccttgatgcagcccgccattccggccgctgtatccaaatgcccgagatttgttttgactgaaccgatgccgcagtattgttttttatctgtatatcggccgtacaccgattgaagtgcggacagttcgatcggatcgccgagttttgttcctgtgccgtgagcttcgacgtacgcgatcgtttcgggatgtatgcccgtctgatcaatgaccttctgaatgacctcagcctgtcctttgacgctcggcgcataaaatccgaccttatccgctccgtcgttattgacgccgattccgcgcagcagcgcataaatatggtcgccgtccttaaccgcatcagacgcttttttcaagagcacggcgccggccccttcaccgccgatcattccgtcagcatccgcgtcaaacgctttaatatgcccgtcgctcgaaaaattcagccccggctgatgaacatacccggcgcttgattccgtatgaagggtcgcaccgccgacaagggcgtacttggctttgccggactgcaggctttgaaaagccgaatgcaggccgattaacgaagatgagcagttggcatggacaaaatagctcggccctttcaacccgagtttatgagaaatcatcgtcggaatcgtaccgctttgggcaagcacccatgacacgtagccatccggcgtttccagctgtgctgtcgtctcctccggcagcaggctgcggtacgagtttgtgctggcagacatatacacgcttgtttccggaatttctttggagatataccccgcatcctcgattgccttccatgaatggagcaaaagcattctcagctgagggtccatatactccgcatctttcggtgaaaagccgaagaaaccgggatcaaacatttctttcccctctaaaactgatttagccggaacgaagccgggatgatcagccagttcttcagaaataccgaatcggcggagctcttcttttgaaaagaaggtgatgctttctttgccttctttgatgttattccaaaattcgtaatgatctttcgctcccggaaactcacaggatataccgataaccgcaaggctgtcctcgtaataatcaggaaattctcccgccgggtgttcccggtcttctgcattcactttcttttgcggcacaggagccaaaacggtttctttcggtttttgttctgtgatgtaccggctgatgtcttttaccgtcgcgtattcaaacagttccgttacactgaattcacaatccagttcctgcgtcatccggtcagtgacagtcacggcaagaagcgaatctccccccgcatcaaaaaagcggtcatcaagctctatatctttgcttttcaatacatcctgccaaatcgccagcaccgcctgctggatatgagatgatgaaaatgtttgtgtgtccggctgcttttccgtcagatcgcgggcagcaagaagcttgcggtccacttttccgttcggcgtaagcggcagctcttcaagacggataaacgaagctggcgtcatataggccggcagcgcttgtttcaaatgattgcgcaattcctttgcagacggaagcggctctccgtttttccggatataaaacgcgcaaagcttctcatttccggagtgattgttcacaaccactacactttcctgtacggccggatgggcattcagcctgctctcaatatctccgggttcaatgcggtagccgcggattttgacttgggtgtccatccgtcccatgtattcaatgcggccgccgggaagaaaacgcgccatatcgcctgttttataaagctttgatcccagttcgagccggtggctgacgaaagctttatctgtcagctcaggcttgttgaaataccctcttgccaatccgtctcccgcaatacaaagttctcccggtaccccttctaaaacagggttgagaccggaatccataatatacacgcgggtattggcgatcgggcgtccgatcgtaagcgcgctctcattctccgttatccgctgcaccgcggaccagattgtcgtctctgtcggcccgaacatattccaagcctcacttttcgtatcgagaaactgctgcttcaattgttcgctaagcgcctctccgccgcaaaggattttcacattttcttcatttgaccatccggaatgaaagagcattttccatgtaaacggcgtcgcctgcatgatcgtcggtttgtactcttgaatcagctctttcagcttccgtgcgtcttttgtgacttctgtcttacagatgttgcactccgctcctttgattaaaggaaggtaaagctccagtgccgcgatgtcaaagcaatatgtcgtgacggcaagcagtttgtcttcggacgaaagccccggttcattcgccatcgagattaagaaattggtcagcgcccggtgcggaatcatcacgcctttcggtttgcccgtgctgcccgacgtgtaaatgacatacgccagatcgtcaggtgtcactaaccgcttcagcgacgttctttccgcggctgtactttcaatatgagaccaatcgcggtcaatggcagttgtctgcacgcctccccagttcaaagagtgctctaaatcagctgtcgtcaggcacattgaaatcctgctgtcggcgatcatatattccaatctgtcagcgggataagaaggatcaagcggcacatacgctcccccggcttttaaaatgccgagaagtccgacagccatatgcaatgaacggtctgtataaatgccgatgagatcatcagggcctgcaccgtgcgcctgcaaatagagcgccagcttcgtgcttttttcattaagctcacggtacgtcagcttttgctcttcatacacaaccgcacaagcgtccggcgtttctgccgcctgacgttcgaacaattcatggaagcaggcatccggatattcacggcttgtttcattccaagtcttaagaatcatgtgctcctctctttttgtcatgagagaaacgttctcaagcggcgtatccggattcgccgtcaaagcttcagcagcctgtacaaattggctgaaaagcctggccgcccctgcttcgtcgaatagttcggtgctgtatttaatcgtaagatccatgcctgatgcttcttcccacatttcaaatacaagatcatattccccctcctgatgaatgtcttttacaaactcacaggagaattccttgtattcatcaagcatcgattgatagctcgaatgctgcagaaagttctgatagaaaaaggcattgctgaaaacaggcgaaccgttctgccggggtttcgcatgcacatcacgcaccattttcggaaagggataaaaggagtgatccagtccgtccagaacggcatcctgcaccttttgaacaaagtcagcaaatgtttcttttcgtccggctctgctccgtatgggaagcatgttaaggaaatggccgaccactccgtcaaagcgttcttcgggtctgaccattgcaggcatgcctgtcacaatatcttccttatccgtatatttgcttaaaagcaccatgtaacagctcagcatgacggtagacaaatgaatcgaacgggatgcggcaaacgtcgttatattattcagcagccgttcgggaagacggcgtgtcagcgtatcttctgtaaactccggaacactgctttccgtgcgcatcggcggaagctgaaggtcaggcagatcgccctcgagctgtttcatccagtaagcgcgggcagctttgctttcttcacccgctaaataccgcttttcccaagccgcgaaatcgggatgaataccgggagcggcagctgtaaactcttcttttccctccagcagcgcctgataatgatccagcagactgtgaattaatgtaatggatgaaatgccgtcaaacacgatgtggtgaatgaccgtcaaaagataatgttcctcggcggattttgaaagcagctgcacgcgcagcaaaggcccgccttctttgacaaacggctctttcacttttttccgtatcagagcggatatttgtgattcattgacgtcagaaatatcttcttccgagaatacaaaaggatctgccgcttctatgaaataaaacccgccgtctgtttcattcacggcgcttttgagcatcggatgctgctttaatacgagctgaaacgcctgtttcagtttctctttgtcgattccggatgtgaatcggaaacagagcgggacatggtatgcagtcgtttcaggcgacattttctgcaatgtccacagccctttttggacttctgaaagcgctggcgccgtttgccgtctctcccgttctgccggcggttcggctttttggggatgatggtccgctgacatgtttgccgctttttcagcagtataagccgctaaagcgccaatcgtcgggtttttgtgcagctctcttgccgtcagccggatgtgatacgttttttcaattgatctggcgagtttcatcatcttgatggaattgacgccaagactttgaaacggtgtatttggatcaacgagctcatccgcgatggaaagttcctctttcagaaaacggataaaatcccgttcaatttctttctctgcagaagccgtgtctgaattgccgccttcttgtctgttattatgtaatgaatcaaattgcccttgttcaaatgaatgtttcagctgagtgcgctggattttcccgatcgccgtcttaggaatgtcttcttttgcgaccggaagcagataatcaggggtaacgccgattctctgtgtcacgtgctggtgaatgtgatgaagaagcttcgtcatgcggttctcatccaacggaacagatgtcacaaagaaaatcgccagctcatctgtcgtgctttgattcggccggacggcgcatgccgctgtatatgacgtttcaatttccggcaattcctcaacggctgattcaatggcgtggctgtaataattcacaccgttgataatgatggcatctttcgtgcgccccgttatcgtcaggcggccttcacgcagaaatccgagatctcccgtttcaaaccagccgtcttctgtaaagacactatcatttaagtccgggcgctcataatatccgctcgttacagtcagacccgacacttggaagcggccgatttctccttcttccaccacttgattgcggtcatccgtaattctcatattaaatcccgggatcggcagaccgatctcgacgaaacgatcgtcgtcactcgtgttttccaatgtaaactcatctgagaaaataacgcccgaagacgtttcggacattccccatgcgggacggatggcattagccggcagaccgtgcggctctaaaagctccataattctgcgtccgactttcgcaaccgcggcctccccgccgttcagcatgtaacgcatggaagataagtcccatttccgcgtttgaatctcttctgcaaaatcagcaagcagcccaaaggcaaaatttggggcccacgtgaccgaagcgcggtaatgatcaatcaggtcgagccattttaaagggtccatcaaaatggattcgctcggtatgttgatttcctcacatccgagataaacatcacgcagatgaagcattccgatgccgccgacatggtcaaaaggcatccagttaaacgtgacatcctcacttgtatagccctgcatctgaatatttcctttgaccatgcagacgatgttttcatggctgagcatcacggctttcggcgtgcccgtgcttcccgaggtcaaaagcagcatcgccaaatcttccggacggggatgatgacagtccgtatccatttcgtgcgcactgagatcttctgccgctaaagcgcaaaaaccggaaagctcctgctcctccgcccattcagtcatctccggcagcacgtcacggcttgtgatgacatacggctgattcaaaagcgtccaggcgtctttcagtttttgcgtcccgctgttcatttctgtataagccggagcggccgcaagcggaacagggatcgctcctaaaaaaacacagccccaaaaagcaggaatcaactgggaattgtcactgagctgtaatatgacttcatcctgagccttcactcctgattggcggagccctttcacaatcgaaagagcgatctttttcaggccgctgtaagtctggtacactttggtgccgtcaggctgtatatatgtgatgcccttttggtctcccgctgccgcggcggttttgtgcaggacttcaggaatcgtcatcggctgatccgctgaaagccgcaatgattttccatagctgacagatggcttgagtaacccgcttgccttcatatcacttttcatagagctgcctccatttcatctgtatgtaagatgtatgtcttatactccgtacatcgtcgtgattcgttttttcacttcatcatcatgaaacgtctcatcgtgcatgattaactccttctcaatgacggccggaagctgctcgcgaaacggcgtcaccaagtgccttttcaatgtaattaaagagtttctcggtttttccgcaagctcacgggccaattcctgcgcatagtctagtacttcctgccgaggaagcaccggaaaaggcacccctcttttctccaggtcaccgccgcggtagtggccgccgtttaacagcatttcatggccgaggcttgccccaagcttctccggaacgataaaggtagcgcccattccgggggtgaaaccgtatttcataaagtttgcggtatacacgctttctttgcttaaaatgacaaaatcactgaaaagccccatgacaaacccgcctccgattccgtggccctgcatggcggaaatgacgggaatatcacattccagcgccaaagagtacatgcggtcttccgtaaacttcgtgatgccctgctgaatcctgagcaggccttcctgtgtgcctccggaagcaaagtaatggccgtatcctgttaaaatcacagctttatagactgacgatttttttatacgggtgaatgcttccatcaatccatccgtcagttctttggagaaggcgtttttatgggctttatcctgcattgtcacttggataatatccggttcaatttcgagcagttcaactgcggcgttcggcatgatatcctcctaactgttctccgtttcccaaggaagccgccccgtttctgcataacgggtgatggctgattggttatccggatctgaaaacatcgcttgattttcggctaaagcaatggatttcgaacgatgaacaaggtcgtttaaggaatccatgtattgtttatagcggatgactgcttttttcgacagcgggcggaggcgcagcaaatgctttctcagctctgttgctgagtccgggacgcatacgtcacaaagtccccattcaagcgcctggcgtgccggcacgggctttgtcatgatcgtcatataatgcgccttttgaaatccgattctttgaattaaaaacggcagaacgcaggccggataaagtccgaataacagttcagataaactgaacgaagcattctcctctgcaatgacgatatcgcacgcggcggcaaaaccgacacctcccgcatttacttttccgcggacgcgggcgattgtgatgtacggcccggattttaatgccagccacaaacggtaaagcggctcctgcgattccgcatgctgcattccctgcctcattttccggtacatctcatcaaaatccgccccgaaacaaaatacctccggctgcccttcaagcactacggaggtcacggagtcttcacattcagaaagaacatgcaggcattcctccactaaacgctcattaatcgtattgttggcttcaggccgatcaaaggtgatgaagcagacattttgctgaaaacggacgtttatcgtttcataggtcacgatatccacctgtatttccgatgaaattccgtgatttcttccaaatataaacgagggctcccggcatgatggtctaaaatgttcggaatcatattcatatccaatttgacattccgggtaccgaacttcaccaaaccgctgcctttaaacagttcttcatactcttccatggacagcctgtatctgttgttcagatgctcttctattttgaaagaatgctgccgcgcttgcccttcaggcgtcacaacgccgctgtaaaattctgaacagcatccggagccgtaggagaaacagccgatccgcttagaagtgtcaaatgccccttggtcaatcgtgcttgcaagagccagtaaagaggctgctcccataatgtttccgactctttggcagtagcggagccccggctctactctggtttgaaaatcctgttcgatttcagcgtttttcgcttttgcaagcttgcgcatcatcgtccggtgggcccctttgaccatgccgccaaacggtgtatggaaggctagatagtgaaacgtctctttgtagtcagcgcccggcacacggtttttgtactcgcgaaatgtctgttcacagcaatcgaggtaagacatcaatgacaaatcggcgtcaccggcttcactgtccgggatcggacggcatgtatccatcacctcatagccgtagtagccgttagcgcccgcatccgcctgaaatacaattggattttcaccgatcaataaggcgacggcacccgctccggcgctgggttcggcgtaagaccaatcctcacttaacgcatcaccgccttcggcaattaaaaaccgggaaatatccgtcgcgacgacaagcgccttcgctccgggggatgtctgcgacaaaataaagttaagcgccatctgcaaacccgccgttcctgaataacaggcttgtttcagttcaaataaacggcagttccggttgaggcctaagtaatcatgaatatatgtactgagtgattttccgaagtcgatgccggactccgagcaggtaatcagcagctcgattctgtctttttcagcctctgtcaatcggtcgataatcggctttgccgcgttaacgccgaatgtaacggggtcttcgtacggaagcgccaccgctttttctttcatcagtaaattttcaaatctggcagggtctaagtttctgtactccgccagctgcatgacatcaaggtatgctgtcccgccaaacacatttatcgcttctattccggcagccgccatgaacttcgcctccaatatgaattttgagtttccgattatttcaccgttttatcagacagcctgtaccttttcataaagctttgccgccaattcgccgatgtttgacactcccgtcagctcaacacgcgggatctgcagtgataattcttcaagcatcatcgtgataatttcggcgcggtccactgaatccgcccccagatcaactaaccggtcttcctgtgaaagctgttcgccttctaaatcaggcaaaacctcgtagattgtgttctgcagcaattcaaagattttttctttactcattgtcagttcctccctgtttcattttttatgaatattccatgttttcaatctatcatttcgtcttgtcaacacgtttgcaaaaatgaacctaacttctgattcaaaagcgtggccgtctcttccataagccgcaggccgataccatcggcatggcggtttttccaggactccagctccgtacctttcacccattgattaaaggcgcctaatgccgggccgcaatgaatctggaagtctaccttggcatccgggtcacctttaatcgccgaagcagaactttgcctgaaataccatttgaatatgagcgccattttctgtttcggattccgttcggcttttgaaatgtcttcattcgaataatgagccttcactttgtcataaatactgcttacacttgccttaaaatacttctcttctatttgtctgagtgtcttttcatcaatttcttcaattgagcggtgacgctgatacagttcatgcagcttagaggcgcgggtcggaaagaacagccctttctttaatacctgcaccttgctgcctgattcaaacatatcgccggccggcgcgtaggccgtgtcctgtacattcatctgctgcaggaggtcctttacgaggctgctcgtcgctgcctcaacggtgcattggttaatagatccggtcacaataaaatcagcgccgagcataaatgcggccatggcagcctcgggcgttccgattccccctgcggctccgatgcggacggttttgccgtatcggtattttttcatcatgtcatctcgtaaacggatgatcgccggcatgagactgtaagcaactccgccgtcagtgtggccgcctgaatcagcctctacgcagatgtcatgcgcaacgggtatttctctcatcagacttgcttcttcagcggtaattttgttttcggctgcaagtttctgcagaatgtgatcaggcgccgggctgagaaacgcttccgctacttccggacgggacagcttggcgataatccgctgacgcgctattatttgtccgccggcaccgcgttttaaccccttagcgcgaaaccttactaaagcgggagtaaccgttaaaaacgctgatgcttccaagttctgaatcccatgcttcagtaaaagatcaatcattttttcttctgaatctgtatgcttcatgttatgtacaacatttatgccgaaggaaccgccgtcacgaagctcatgctgaattgacaaaatgacgtcctcaacgtgcgcgatgttcaaaccgcccgttccgaaaaagcccatcattcctttttcggccagtttgacgaccatttccttcgaagaaattccccggtacatgccgccggccaagtaggcgtatttcaattgataatcgcgcttaaactcttcatttcctaaagacgccgccgtaattgagctttttccagcctcagccgggactttgatttcatctgttatcggctccgcttcagccgtaattctttgtatcagccccgtcagcacttttccgggaccgatttcctcaaagctcatgttctttcttcccattaagaaacggatgctgtctgtccagttcaccgatcccgttatttgtccggtgagtgtctctttcagctctctctgctcatagggtcttgccgtcacatttgaaatgaccgggatggacagcggcttaaaatggaaagattcaataaaccgtgaaaactcttccttcgcttccagcatgtatctggaatgaaaggcgccgctgacatttaagcggtgaaccattttcacgccgtttacggcttcaaaaacggatgctgctttttcaatatcttctttatatccggaaatgacaatttgctgcggtgtgttcatgttggcgatatcaatcatatccaagtgattttctcttaaaacatccgtcacctgctcatgagtcaggccgatcaccgctgccatgccgcctccttttgcgcggctcatcagttcgcccctttttttgaccagctgtaagccttcttcaaaaccaaaggcgcccgaagcgtataacgcgttatattcgcccaaactgtgtccggcggtaaaatccggtttcaagccggttccttctgtttttttcaaataactgagggcattgacgacatagagcgccggctgagtgaattgagtctgattgagacgttctccgtcccggcacagctcctgaatggaatatccgagaatgtgatcggcctttgcggttaattcaggatagcggccgaacaggtcttcccccatccctattctttgcgagccttggcctggaaaaacaaagctgatcatcttacagtctccttccgggcggtgataaaatgctgtcttctatttgctgcaaatgtgtttgttctttatgaaacggcgtcataatggcacggatgcgttcagccgatcctgcgggaagaatctgtttggcaaatgcggccaatgttccggaaggcccggcatcgatatacaatcctttttggcggctgtctgcgaattgaagcgcttcgcggaatcgaatcggctttcttacgatatcccagaaaaagtccgcttgtatatcggtctcagcctctccggtcgcactggagatgtacggtataaacggagtccggattgatttctgagctaaaaagcgcttgtacggctgttccgcctgatcaaccagcgctgagtgaaacccgtaagataccggcaatagctgatgaggaatctgcttttctctcagatcgtccatgatctttttgatatgttcccgctctcccgagatgacaaagtgagaatgatagtttacagatgccaattcactatgttcgccgagcagcggatcatcttgatataaagccggatcacccagtatcgcaagcatgctgccgttacggcaagtttccgtaacgattcgggcctgttccagcacgcaatctaaagcatcctcggcgctcagcacgcccgacacagcggccgctgcatactctccgaggcttgctccgatcacataatcgggacgtatgcctctttgctccaaagcatatgcaagtgcgtactcagccataaaaatggcaggatggctgaaaagaaggcggtcaaatggatcagacagacgattgcctgtatgatacatctctttaaggacagagtaaccgaaacggctgactgcaaaatcgtccaagtcaagcattttctgccgaaaagcggcgttatgtgcaaacagctctttccccatttgatagtattgggaaccctgtccagaaaacatgaaaacaattggctggttcattagttctcctttttgctctttattttttcaaaatattgatttatgagtttttcgtgatgtcgtgtgcaggtgaagtggtcgtgatgctgtatggctggcactattgtgtgagataagaattttgacttgcgttccgctacatggcgggtgaagcttcagtttcttttttgatgcggtgaataagtcctgtcagcacatggcccgggccgacttcttcaaattccatccgccctttgtccagcagatagcggatgctgtcgttccatcgcactgaatggtcgatctgatcggccagaacggagtggattccgtcttgctcataaggtctggcatgcacattagaaatgacaggaattgatatagcagaaaaatgaaatgactgtaaaaatttttcgaactcttgttttgcttcactcatatacctcgagtgaaaagcgccgcttacgtttaacggatgaaacatcgtaacgtcttttaatccttcgaatacgcttttggctctttcaatgtcttctttgcgtccggatatgacaacttggtgaggagaattcatattggcaatatcaatcgtatgtaatccgtgcgtttgaagggcgtctgacacttgagctgcagttaaccccataacagcggccatttttccgtcagtggccatactcattaattcgcctcttttacggacaagctgcaggccggtaataaaatcaaacgcacctgctgcaaacagcgcattatattctcccaaactgtggccggccacataatccggctttatgtcattgtcttggatttttttcaaatagcttaacgcgtttacaacatataaagcaggctgggtgaactgcgtcttgtgaaggttggaatacggattctcaagacaaagccgtttcatggaatatccgagtgtttcatcagcctgctccgttaagtctttaaattcatcaaacaatgagctccccattccctgcttttgagaaccttgtccggggaataagtatgtgatcattttctcagccatcctttctcggattcagataagaagcatgttcaagttgatagtaacttcacaaaaataccatgtcaagttaatttatcctatgcgaactcctgaataatgcctatttttccctgtcgaaaggcgggctcagggctttcggaacaggcgtaagcagaatgtcccatccggcctgcccggcgttctcttccgcaaactcccgttactcagccattcatcaccagaaatctagtaataactaccattccatttcagaacttctttgcctcaaaagaaaagctagttagaaagaactaaatcacacattacttaaaatgaaacagccctttttgattttttctgttgcggaaattcacaaaatgttcttttttttcaatctgaaagtaaatattgtttttcaaaagactctccattttttgacccggcttctccccgaaggagtgccccggatacacacgcacatgcggcggaatggaggctttgatcctctgtatactgtgaaacatatcttcagctgagctgcccctgtcctcacatataccgcacccttctgtaaacacggtgtcaccggtaaaaagatgatcagatagcaaatagcacattcccccggccgtatgtcccggggtcagtatacttctgatgataaaccctccggccgcaaaggtttggccgtcttcaagcgctattaagtttctgcaccggaattgatagaaatcgatttccgccgacgacatgtatatatcagaatgatagatttgctgaagcggctccgccaagtttacatggtcataatgcgaatgtgttaataaaatagctgataaatcaacatccaattcatgcagtttatcggttattttatcgatttcccaggacgggtccaccgctatcgcagatttttttgagcggtctgcgataatataacaatagttggaccacatctggtgataagttttgatttgatgcacttcatatgtatgatccattgtcaccattcccatttaaaagatccgggcagactgctgccgccgcccagccgactgtaaccactttaccagatgacaccacgtttttccatggattttccggtaaagataaaaaaactttctgctcccgccaaaagcaccagtctggactttttttacaaattgctatgctgatatataaggaaatcaggatgttcatttagatgaattctttagggaattttattcagaaaatcaagaatggatatgagtttcggataaaaagaaaacaaattgagcttttgttttgaaaagcaattgccgaagcggccgaaggggatgatcagtttttagaaatgacccgcaatcaagattattatctcaatccttttcttcaagataataccgaattgcaacgttatgttgacattaacataattagatttagaaaagtacagcgtaatttacactcttttcttttgtgaaaacaccattttaaaaatcagtcctagctgcaacaattcacgaaagcgccgcgcatgaaaaaagacgccagttgaagacgattaatatttgatctgctgcccaatgatttaagcatattttgatcaaattgaacaaacaggcgcaacatcaactgataaaacaattgccccaataattgatcataaaatatccagattaccaaaaggaggttttataaaaattaaaattcttagggacttcccttaaggcagggatcaacatacttttagaacagctagtctagttgctatattttcgcctaaacttttacttaatgattttatattaattttgatttacacagtaaaaagataaacctcatttatcttcttcaattgtccaataaatctttaatcagaattaacaaaaacatctgatctccttgtcaaataatcgaatattatacgtttataagaatgagatagatccatacttttatatataattctattatttacacttataatattttccatttaggtacgatatacctatttacctaaaaaatccatattgctagaatagcaactaaggaaggaggagtaattaactgtgttcaatccaaaaacagagaataaaccgaaaatcaacattttaagctctgtttaatattggaggctcatactatttttacttacagggtctttagtcttttctctctatatgttgtcaaacaatcgggctacagattctaaataaacagctatgaattatgcatcacttttcaggagataaaacaaattttcttacaaattaaagtgtttctcaatctataaaagttgtaattaggtatgtattaaatcataaaacaaagtttttggcaggaaacagaattagaattgaacttgaagccaggtttactaagattgaacctgcctttagagatttgattggttatccggtaaattatcaaatccaaacattatcgataaaacattactcattttacaatattggttatcttgggtttccagagaagatcaaaaaacaataatatagattaaacggaggattaacaatgaaaaagtctgtaactaaaggtcttattatgtccactgtcgcaagtgtatctattttttcattagttccactagcaggagctgtttcagcagaaaaagaagtccaaactaatcaaacaatacaaagccaataccaaaacgaagcagtcttacataaaactgcacaattaccgaaagataacgttagtcttgacgaaatagctaaacactttgaattaaccaaaagtgaaacaaatcaacttaaagaagctgttaaaactgttaaagaaaaacaagggtcggagtttactgctcaaggtaaattgtcctgggctgtaaaagcactcagagcagcttgggatgcaatacctactaaggttaaagctgctatgggcggaatcggcggttttgaaataattcttaataccatcgacaattttactggtgcggttgaagatgcgtgctatgcgggtgctttaaaagtaactgggaacccaacagccgcttggtggattactaaaactcttatgcttttcctttaaacgggactattgttggtgtttaacaaatttatcctgtgttaagctttaaagtgattatttctaaagtgttaagacaggaggtaactatggaagataaaagtaacgctgaaccgagcccaaaagctataaaaattctaacttacattattcctatagttttaatagggcttatccttgttcttaagaatattaataccgcagcagcagaaatttcattttatatcgttgctatcggtgtggttctcttagtggttttcagtttgatcaaaaatagaaaaaaccgcaggaagaactaaatgtaaggggggctaattactagtcccccttgactaacttgcggatagtataacctgccaaattcgaattttatttaaattccccctccatctcctccctgtgaatttggaaaagcaggtacccatctatataactcagggtagtcatctggttcttcacagataactttaagattttaaggaatcgttttctccattatttcactattaatgcagtgacatatagacggttacaccaaacacaagatgctgcgctgtcaccccaaatactatccataaacaatttttatatgaaagaaaagcagctggatgttaaacaaattattttcatgatttacggcatacagatgcaacaattatgccagaaattaaaaaactcaaaagttatctctgaaaggctgggtcattcaaactagtaaggctgcttgtgggcaaataacggtttagtctcacataaacgttgtgattacatcacacgcttaaacatcttctccatctcatacgtactgttatttttagttttttgacaataaaccatgattactcaaaacattgatatttcagagcttctaatagttttctgggtaaatatttttattaaattagcatggttagacataaagagagcagcctccttttttgatgataataaatatgatgatgagtggatcgagaatggttacaaaattaaatttaagcgaacccctattataaatatagcggatgtttatatatctaagaaatagtcttaactttttaatttaagggaatgaaagatatgctgactcagaaaggaaatataccgtattatacttaacatgagctaccgatgtaaaaggccagttaaagagaaaaacaggaaaaagcgaaatagatttacgtgcagttgtaaaaagtctcatgcgacaaggagaggttccgtaagacaaaatacaaaattgcatcatctaaaaaagcccaaactctaaaaagttgggcttttaatttaagcggggagaaagcgatttgtagccttaaaataaagtttgattaaatgaacttaataaaccttgataaaagtacaaatagaaaaaacgtgttttgaaaaaaagattgatcaaaacacgttttttctatattcatttcaatcatcgttttataaaaaagtttgatcattttatgtctagaatcttcaacaaacgcgcagtctgaggaatagtaccttataataaaaactgctgagtgctacctagactgaatactccacccatgtgttttaagcttttttatataatcttcaacactaattttttcaacttcaattgctaacggcgtcagtgaaacaaggcactcatttgaagtataatttattgtaacttttaccacctcgtatccattatggaaacctgaatcaaatccaggatcgtcaattatatctcctacttgagggcgaaagtcagattcaaatgttttcactaatgtttgagtattttcctctgtaggttcttgattaattgatgagacaaataatattaaatttatattcaaagcatttccccccctttctatgctgtttaaataatctttagtttaattctattgttattgatgataacaaattttaacttgcatcacaaattaattgtgccattaaatggaccgtttgttgaattctaaaaatctgtattgttaatgtgattctatcaaacttttttataaattatcggactttgttttacataatcaatctttattttaaagctacacgattaagttttttagtcctcccctctttttcttttatttgattttactactatccccgtaatttgcacaaatggaaaaaccgcaatatgattgcggtctgctgtgatctgtatttgaagttattcagtccgctcatcagcttgcggctttagtaagatggttaagacaattcctgataatatcaaaacatttctataaaaaaagattcggattatagaatgcttaaagacaattacctggacaaggaacaagtatctgtctttatggaggcagcaaaatcttctaaatatcatcattacatgatcgctttaactcttttaaggaccggcttaagaaaaggtgaactcattgctttatattggtccgatattgactttaataacaaaactttaaggattgctaaatctaagaacgagtttggaatcacagcacctaaaacccgtaaaagtgttagaactataagcatcgatgacactttaattaaagagatgaaaaagtttaaggaatggcaagaagaaaataaaataaaacacggtgataattataaccagtctcccttttttattaccaaccataagggagatgaccttggaccgtttggaattgataaagtcatagattccttgctaaagaaaactgatctgcaccacattactccacatggtttgagacacacacgccattatgctgctagaaagtggtgcagatatcaaatttgcaagtgagagactcggtcatacggatgtgaaaatgaccgctgatgtctatatccatatcttgcagaatcacaatcaaaaaagcattaatcagtttgatgaatacctaaacagctaaaatcagtgggcaaaatgtgggcacgagagagaaatccctcacagaatccttctacatcacacgcttaaacatcttctccatctcatacgtactgtggtggataatgatcggccggccgtgcgggcatgtgaacgggtctgtcgttcggcgcaggtcgtccaagagcgctttgatttcgtcgtttcgcaaatggcggttcgctttgattgagcctttgcagctcatcataatggccgcttcctcccgcagtttcttaatatcgatctgtttggcgtcaagcacctgctgaatgatttcttcaatcagttcagcttcttccccttttggaaaccaggccggatggcagcggacgatgtagctgttcgtgccgaatgcttctaaaaatactccgacgctttcaagctcatgctgatgctggtcaatgatcagcgcttcatttgctgcgtaatgaaaggtgagcggcacgatcatatcctgcacttcaggctcgacctgcccgactttctcccggaaatattcgtatttaatccgttcttgggccgcatgctggtcaatgatatacaagccgttttcgttttgggctaaaatatatgtcccgtgcatttggccgatcggatacatcaccggaactctttcctcccgtatttcttcagagacagcttccggttccggagtatcggaaacaggcgcttccgtttcgggcatgccgatctccggcggcacatcgtgatccgcttcattcgggaggatctcttcttctattattaccggctcaggctcttttacgaccgaactcagcttcattggtgagtaagacggctccggcgttttttcaggaagtttccgctcaggcgcgctttcctcgaatgtcataaattgctgttcgtttttggccggtgccggcgcggattttttcgggagctgggcgctcggaataagccgctgcttttgaaacacttcctttatcccgtcacggatcagctcatgcagctccgtctctttgctgaggcggacttcaagcttcgacggatggacattgacatcgaccaaaatcgggtccatcgtaatttcgataaacgtaatcggatggcggccgatcggcagtagtgtgtgatagccctcatgcaccgcttttacaagcgggaaattcttaatgtatcttccgttaatgacagatgacatgtagtttctggatgcacgcgtgatttccggaagcgcaatgtagcccttgacttcaaaatcaagcgagctgacatggagcggtatcatttttttcgcaaccgccgtcccgtaaattgcggccagcacatggcgcacatccccgttaccgtttgtctgcagcagacttttcccctgatggcggagacggatcgatacttccggatgcgcaagagcgatccggttgacaacatccgtaatattgccgagctccgtatgcacggttttcatatatttcaatctggcgggtgtattgaaaaacaggttggtaacgataatttccgttccttttctgctggaggatttctgctcagaaatgatattcccgccctgaagaatgagatgggttcccgctccctcgccgatgctcgttttgatttccagatgagaaacagatgcgatacttggcaaagcttctccgcggaaaccgagtgttctcacccggaacaggtcgttttcatctttgattttactggtcgcgtggcggcggaaagcccgcttgcaatcatcggtttccatcccttcgccgttatcgagcacccgaatcgacgaaagccccgcttcctctatgtcgatttcaatgactgtgctgtttgcgtcgatggcgttttccaccaattctttaacgactgaggcaggccgttcgaccacctcgccggccgctattttatttgagagttcatctgagagctggatgacttttgccaagtccgtcacctctttctattttaattttttttgcagcttgtacatttcattcatcgcctcaagcggcgtcatatcgagaatattaattgacttaaaagcttcaagcacttgtttttctttattagaaacagccggtgccttctgttctttttcaccgtcagtaaaaaaggacagctgtgccggttcttctctgacggcggactttttctcagataccgccggaagctccggtttatcccccgactgctcaagctgtttcaaaatctcctgcgcgcggctgatcagatcgtccgggagctcggcaagctgggcgacatgaatgccgtaacttttatctgcggctccttctttgatttgatggagaaacacgaccgttccgttatattcctctgcgcgcacatgaacgtttttcagctgaggaagcttatcttcaagcaccgtcagctcatgataatgcgtgctgaacagtgttttagcgccgatatgatcatggacatactcaataatcgcctgtgccagcgccattccgtcgtacgttgatgtcccgcggccgatttcatcaaacaggatcaggctgtcttttgtggcgttcacaatcgcgtttttcgcttccagcatttccaccataaaggtgctttgtccggaaatcaaatcatccgctgccccgattctcgtgaagatttgatcaaaaatcggcagaaccgcttcttttgcgggcacaaaacagccgatctgagccatgatcgatagaagtgcgatctgtctcatatacgtgcttttacctgacatattcggacccgtaatcaggagcatttcccgcgaatcgcccatcaggcagttgttcggcacgtattcttgactgtccatcaccttttcaacgacggggtgtctcccttcaatgacttttacttcattatcagaaaagacgggctttgtgtaatgcctgttttcactgatcgtagcaaagcattgcagtgcgtccagctcactcatttgtttggcaagacgctgcaagcgcggaataaattgtttcaccttttcacgcagtccggcaaaaagctcatattccagctcgcagatgttgttttccgcttctaaaataagcgcttctttttccttcaattccggcgtaatgtaccgttcggcgtttgtgagggtctgcttccgctcataccgtccgtcttcaagcagatgaaggtttgcttttgtgacttcaatataatagccgaacactttattgaaaccgacctttaatgaacggatgcccgtataagcgcgttcctgctgctccagtctggcaatccagtctttaccgtttttgctggcgtcacggtactcatcgagcttctgatgatagccgtctttaattaaattgccttcttttaacgataacggcgggttttcatgaagggcatcttctaacaggtcaagcaaatctccgcacggatcaatcaagccggcgcgttcttttgcttttttatggttaagagaccctacaagctctttgatgctcggcacttgttttaaagattctttcagctgaattaaatcccttgcgttgacgtttccgaatgcgacccggcccgccagacgttctaaatcgtatacttccttcaggcgctctcgcagatcttcacgctcaaacagatgattgatcagcgtctcgaccatttcctggcgttcttcgatttgggatgccctgatcagcgggcggtcaatccattgtttgagaagccggccgcccatcgctgttttcgtctcgtctaaaagccaaagcaatgacccttttttgcttttcgaacggatcgtttccgtcagctcaagattccgttttgaatacaggtcaattttcatcgcttcttccaattcatatacttgaaccggctgcaggtgatccaggctccgtttttgcgttttttgcaaatacgtatataaacgcataaacgtctctgtcagctcttcgcccggcaagtgctttgcgatttcaatgcgttctgttatttccccgtcttcgatggaaatcgtggcgccgcaccgttctttcagctgagcagctgtatgttcgttaaacttgctcgatacgacaatttcctttgcgccgactgagtaaatttctgacatgacatcttcaatccgctcaataaatacggccaggttttctccggtcgttaagtccgataaagcgagaccgtatccgtcacgaaattcggaaacggaagcgataaagttgttttccgactcgtggatgccttttccatccatcacggttcccggtgtgatcagctggacgacttctctttttacaacgcctttagccgccttcggatcttccgtctgttcacagatcgccactttatagccctttttaatcagctgttcaatataagccgccgcggaatgataaggcacgccgcacatcggaattttatcagccgaacctccgtctctgcttgtcagtgtaatttcaagctcttgtgacgctttttttgcatcttcaaaaaacatttcataaaagtcaccaagccgaaaaaataaaaaggcatcttggtgctctgcctttaccttcaagtattgctgtatcataggcgtgtaactagccatcatttaatccctcactatgtatcttctcttatccgaatcccattataacataaacaaaagagtgatatctttatatataaaaaagagacttggggtgttaaactcccctagcctcaacttattcttcaggatctccgactaaaaattcagggttaatgtcctctaattcttcatcaagatcgtcttcccaatcatcatcatcgtcttcttcccagtcaggattgacttcgacgacgactttcgtttcaccgaccacttctgctaaaaattctctctctgcctgaaccacgattttatttccgttaggagaaatggtgacttcaagacaattcggctgctgcagcactttggcaatgacttcgtgttcgtcatctaagtaatttgtgtctctgtatctgagtttaatcacatcgacatactttactctctcggttacaacttccgtttttgtattatcggcgtaagagtaccagacgtttatatcataatacccttcaatttctacagtcttcccgatcttttcggcatcgtacttgtggttgataatccagccgcccaatatacttgacggtttttctccaggtgagatcgtgttggtgcattgggtgaattttcttcctttcgcaactaccgctttcgtaataatttccctgtattcagacattccggcaggcctccttgttcttcttcgtgttatcttatgctgggcatttgtctcatgtgcatttttataataaaaatataaaaatacaaagtttctgtttcattgtatgcagccctgcccagaaactttacttttaagtatgataaaactttccagtaaaatgggacaaaacggtgagtcaatgaaaatttagtacatattacaattagttctcaaataacaaaaaaaaacacgggccgatgaaggccccgtgtttaaatagaacagctattattcgaatgttttacttttgaaccggtttctcccgtcagcaggttgcctccggtagatgtaatgatttcgtttgtcacctgatttgagatcgtatgtgcgacaagctgaagaaggtcattgacctcaatctgggaatctctgaattcctgaatgatcggaatcccttcaagctcttcctgcagggcgtcaattttactttccacttgtttcagcgcttcaagcttttcgtagtgcttcaggttaacggcttgcttttgcagagttttaatctgattaataatcgcagagactttttcattttcgttaatctgcgcctcggcgcgtttgaaaaaatcaacttcttctgtttcagaaatcattttcgcaaggttcctagcctgctgtacaatgtctttcttagagtaaagcgtcattattatttcacctcgattgcttctcctgccatcacaccgtcaagcgaccatgttttcgcctgttcgattttgacgcgtacaatcttgccgatggcgtctttcggccctttgaagttgacgagcttgcttttttccgtatagccggcaagaatgtcagggttatttttgctttctccctcaactaatacttcgacagtcctgccttcatattccttcatttttttggctgaaatttctttcaccaaatcattgaggcgctgaagacgttctttcttgaccctcatcggaacattgtctttcatcttcgctgccggcgtgccttcacgaggagagtaaataaacgtatatgcgctgtcaaattccacttcgcgatataacgaaagcgtttcttcaaattgttcatcggtttcattcggaaaaccgacaataatatcggtcgtcagtgaagcgtttggcatcgccgctttaatttttccgacaagctccagatagcgttctctgtcatatttgcgcgccatcatttttaacatcgctgagcttcctgattgaaccggaagatggatatggtcaagaaggttgccgcctttggcgagcacttcgatcagatgatcatcaaagtcacgcggatgactcgtcgtgaatcggattctcggaatatcaattttacgcagttcgtccattaaatcaccgagaccgtacgtcatatcctcaaaatcttttccgtacgcattcacgttttgaccgagcagcgtgatttctttatagccttcgcttgcaagtcttctgacttcctggataatttcctcaggacggcggcttcgttcttttccgcgggtatacggtacgatgcagtatgtgcagaacttgtcacagccgtacataatgttgacccagcctttaatttttccgttgcggactttcggaaggttttcaatgacatccccttccttcgaccacacttcaatgaccatctcttttgataaatatgcctctgataacagttccggcagacggtgaatgttgtgcgtgccgaaaatcatatcgacaaacgggtgcttcttaaggatgcggtttacgactgattcttcctgtgacatgcagccgcagacgccgagaatcaagtccgggttattttttttgagcgcctttaaatggccgagctctccgaacactttgttttcagcattttcccggatagcgcaagtgtttaataaaataacgttcgcgtcatcaaccgaatttgtcgcttcataaccgagcgccataaaaatacccgccatgacttccgtatcatgctcgttcatttggcatccgtacgtgcggatataaaatttcctgccttcaccgaggcctttaaattcttctgagattttaaaatcgttatgatattgaacggattctttgccccgttttttcgcatcttttaaagaaggcggaatatatacggcttcaaaatacttgctgtaatccttttcggatgttttgtccgccggattcacttgtccgctttcctgcttttgcttttcattcatgttcgaatgtctcctttcaaccgaaacttccaccctcaagtatactggttaaaagcgtttgacacaaccgccagcctattattgtacaccttattgagaataagaatcaataagaaataaaaaagagggaatcatttcccccttacacaagctgcagctcttttgcggctgaacggattacttccagggcccggtcaagctcctcttttgtatgctccgccgtaataatggtgcggattctcgcttttccttgggcgaccgtcggatacacgatgctttgtgcaaagacgccgcgggtcaataaaaggtctgataatgcctgggctttttcttcctcccctattaatatcggcacgatcggtgtttcgctttttgtgagggtcagccccatttgaaccagtttgtctttgaaatacgccgtgttctcccatagcttttccatatgctcaggctcttccagcaggacgtcaatggcttctatgcatgcggccgttaccgcaggcggatgagaagtgctgaataagaaaggacgccctttatggcgcaggtaatcgatcagaacctgcgaccctgcggcgtaaccgccaagcactccgatggctttgcttaatgtgcccacctgtatgtggactcttccgtcaagcccgaagtgattaaccgttcccctaccgttttttccgagtacgccggaagcatgcgcgtcgtcgaccatcacaaaggcatcatacgcctctgcaagtttgacgatgtcaggcaaaggagcgatgttgccgtccattgagaatacgccgtcggtgacgatcaggcgcatgcggtaattcattgattttttcagcaccctttccaaatcgtccatatcaacatggcggtacacctttttatctgctttcgtcagcctgatcccgtcaataatggaagcatggttcagttcgtcagagatcacgatatcttcttttgtaagaatgcttgataaaacgccctgattcgttgtgaaccccgattgaaaaacaagtgccgcttctgtttttttaaagtttgccaattttttctccagctcattgtgcatggtgaatgttccggcgattgtccggacggaccccgtacccgctccgaattcttccgcggcgcgtttggccgcttcgacaagccttggatgcgacgtcaaaccgagataattgttcgatgaaagctgtatcacgttttcccctttgacttccaccgacggaccctgcttcgtttcaatttgtttcatttgctgccatgttttattttctttcattttatcaagctcggcttttagaaattcaaattctttcattatagaaccctccccttatggaatcaaaatgactttgccgcactggccctttctcatcaggtcaaaccctttttcaaagtcttcaagcggaaactgatgcgtgatcaccggcgtcagatcaacaaggccgaattcaagcatgtgcgatacctgccgccatgtttcaaacatttttctgcctgtgatgccttggacggtaagtcctttaaacaccacgtcatttgtcaggtcaaccgtcaccggacgttccggcagactcagcatatggaaccttcccccgttggccgccatctttaatccttgtgcgatagctgccgggtggcctgacatttcgcagacaaggtcgatcccttctccgcctgttaaggtgtcgatcacctcaagcggatcttccttatcagctgaaatggtgatcgcagctcccaatttcttcgcaagagccagcctgtaatcatttttatcaatcgccgcaatacgggatgcaccggccgctttagccaccgccaccgccatcagcccgatcggtccgcagccgataattgcagcggaaccgcccgcaagctggctgctttccagcaccgtatgcaccgcgttgccaagcggctcttgaacagaagcgacggcggggtccatatcagcgggattttcccaaacatttcgagccggcactttgacatattcagcgaaggaaccggctgtatctacgccgaggatctttgtatgggtgcacacatgatgttttcctgttaaacaagggacacaagtaccgcagacgaagtgggtttcagccgaaacgtagtcacctattttgacatttgtgacgtgcttgcccgtttccgctatgataccgctgaattcatgtccgaatacttgaggtgttttgattcgtttctgcgcccattgatcccaattataaatatgcacatctgtaccgcatatagatgcggcctgtactttaatgagaacttcattctcattaatggaaggtatgggaatttctttcagagttgctccgaaagcgttttcatttttgacgatagctttcatctttcctcccaacatgtacactcctcctcgaaaaaacactgtaataactggattgtaacatgagataaaaaggaggtaaacaccagtgtccactccgagaaaacaactgcttccgtccgaaaaaatgggcgggattttttttgattattatatgaataaagccatttatcatctcttcgtactatcaatataatattgtgagaaaatatgacaacaataaaaacaacccgctcgccttacgcaagcaggttgagaatgtcatgtttttgtttttaacggggttcgacgattaacttaatcgccgttctttcttctccgtcaatctgtatatctgtaaaagccggaatacaaatcaaatctacgccgcttggcgcgacaaagcctctggcaatcgcaaccgctttaacagcctggtttaaggcgcccgccccaattgcttgaatttcggcggctccgcgttccctcaatacaccggcaagcgcgcctgctactgaatttggacttgattttgctgaaacttttaagatttccatttctgctcccccttagttttacaatggataagtgagtgttcattagaacaatcattattagatgttgctatccaaaaagccatccccacaatgcttttcaaaaatagcgggctaccttccatttctactatattcactaagaagttgctatattcctgcttttccttttaatatttttataaaataaacacatgatcacctattcaaagaacatatggtcatcattgattaatatccgttcgatatttacggcctttttcgtttgatcgtcgatgtcaatgagcactccgctcagcgtagttttaccttccgccaccgtaaaccggacgggaagattggttttaaaccgcttgatgaccgtttctctgtccataccgagaattccgtcgtacggacccgtcatgcctacatcagtaatatatgccgttcctttcggcaaaatgcggttatctgccgtttgcacgtgtgtatgggtgcctaccacggcagaggctcttccgtctgtgtaccagccgatcgcaattttttcgcttgtcgcttcggcgtgaaaatcaataaaaatgtacggcgtgcgctttttcgcttcttctattaattcatccgctttagcaaacggatcatcaagcggcggaagaaacgtccgcccctgtaaattaatgacggcaagctcttttccgttcgatttaatataagtaatgcctttgcccggcgtaccttccgggaaattcgccggccggacaagatgcggcacatcatcaataaagtcgaagatctctcttttatcccacgtatggtttcccattgtaatggcatctgctcccgcttccatcaggctgtggtagatcttttctgtcagtccttttccatgtgctgcattttctccgttaataattgtaaaatgcggtttatgtttcgctttcagtttcgggacatattcttttaccatgtcgcggcccggggaaccgacaacatctccaataaataaaattctcatacattccattccttccttttcagggactcaaaaaaataaagtgatgcgctaagcatcactttattttgcatactctacggctcgagtttctctgattacggtcactttaatgtggcccggataatcaagctcgtcctcaattcgtttacggatatcacgtgccaaacgatgggcttctaaatcattaatggagtccggcttcaccatgatgcgaacttcacggccggcctgaatcgcaaatgatttttcaacaccttcgtaagactcggagatttcttcaagcttttcaagtctgcggatatagttttcgagcgtttcacttctcgcgcccggtcttgcggctgacagtgcatcagcggcagcgaccagaacggcgataatggaagtcggctcttcgtctccgtggtgtgacgcaatactgttaatgacgactggatgctctttatatttggtcgcaagctccactccgatttccacgtggcttccttccacttcatggtcaattgcttttccgatgtcatgcagaagaccggcccgcttggcaagctttgcatcttctccaagctcggaagccattaaacctgctaaaaacgcaacttccattgaatgtttcagtacgttctgcccgtagcttgtacggaatttcaaccggccgaggatcttgatcagatccgggtggagtccgtgaacgccgacttcaaacgtcgtctgctcacccatttcccggatatagtcatctacctcacggcgggatttttcaaccatttcttcaatgcgcgccgggtgaatacggccatcctgaacgagtttatcaagagcgattcttgccgtctcccgtctgatcggatcaaatccggaaagaatgactgcttcaggtgtgtcatcaataatcaggtcaatacctgtaagcgtttcaagcgtacgaatgttacgcccttcacggccgatgatacgtcctttcatctcatcattcggaagattgacgaccgataccgtcgtttcggcaacatgatctgctgcacagcgctgcaaagcaagcgacagaatgtttttcgcctttttatctgcctcttctttcgcacggttttcggtttcttttgtcatgatggcgatgtcatgtgaaagctcattttcaacccggtcaagaatgatttgtttcgcttcatcccgtgtcaggctcgaaatgcgttcgagttctgactgctgcatacgaatcatctcatccactttgctttccatctcttcaatatgttgttgtcgttcattcagagaatgatctttcttctccaacatcgcttcccgtttatcaattccttcatgtttacggtcaagattttcttctttttgaagtaaacggttttcttgtttttgaagctcatttcgtctttcacgaacttcctgttcagcatctattcgaagtgtatggatttcgtcctttgcttcaagcagagcttcttttttcagtgcttcagcatcacgctttgcatcttcaaggatttgctcggcagcaccgcgtgcgcccgcaatctttgcttcggcaatggttttacgaacatagtagccaacaactaaaccgagcagagtcagcaaaatggagatgagaaccgtcattggggtcatactttcacctcctcttgctatgaacttggtttttgcttaaataagtgccggcatgtacattgtctgattttctcaacatacagaaccttcacagggaatgagtctctcatgcccttgtcaagtttaaatggtttaacaatcatgttaaaaaaacaaatgttacaacttcattgtaattgtgtcggaaatacttgtcaagcttgccagcttaacgattcgccttcagctcggatcttcgcccatgtatatatcataccataccttcatccgcttttcgtgaatgacggctctgttagtccgcctggttaagcaattggtaaattctattgtttacctgtcctaatttggcgttattctgaatgtttgacagtaatatgacatatttgcttgccgaatggctgaagctgttcaaaatgttgtaaccgggcataacaccgtgattggaatagcttcccggatcaatgtaaaaccccatgccgtaagcggcactgcttcctgctgtaaacatttttgtgaagctttcttttgaaaggagcgtgccatttacgatccctttatcaaatttatagagatcttcagcgctcatatacatgtcgcccgccccgtacagctgcgataagtccagaaggtgcggcgttacaagactgccgctctcatcgactttgtagccgacggcaggatatttggctttggcaaatgttttgtaaaatccggcatgcttcattccggccggtttgaacacgtgttcttttatatattgttcataagactccccgctgacttgagatacgatataagcaagcactgaatagttggaatccctgtaatcccaaaccccgggctgccgtttaattccgcggtattctatatccttgattaaatcaattggagaaatcggtccctgtccctcaatatgcccgtttatgccggacgtatgattgagcaggtttttcaatgtaatgcgcgtgccgttaggaaaattcggcaagtatgtactgacggggtcactcgtctgcagcagccctttttcttcaagctgcaggacagccgtcgcgattaacgctttttgtgaagaaccgatataatatgatgtctccggattgtttttaattttttgttttcggtccgcatagccaaagccttttttcagcacaacttttccatcttttacgatcattgccgtgccgctgaacccgatctgttgcaggtaattgctgatctgtttattgtgatcgattgatttaggtgttttctctttttgcgtcttttcttttttctgttgagtctggtcttttgaagtatcagattgagcggcgggagcgtttttaacggattccttctcccggtgatgcgccgtgacggtccagatcataataaaaacagtgacaagcagcagaaaaagaaacagccctcccgttttcatcagcttcttctttctttttttgttaattcttgtgcggcgggggctcgtcatcttttttcctcctcagatataatttcaactttcgccatgatgttagacgagtgaagggtgaaaaaagttgtaacatttcagataaaattttccgaaacagccagtgtttttttaaacacacaaaaaaagagcggaaattgcttattccgcccttttgatcgtgtttttattcttctaattccatctcttcctgagtttcttccgatttttccgtaacaccgttattgtccaaaccgtaatgttcacggatttgttcctgaatcatcagcatgatgtctttattttcttttaagaactgcttggcattttcacggccctgaccgaggcgttcttcttcataagaataccacgaaccgcttttttgcacgatatccagttcagttccaaggtcgatgatttccccttctttggagattccttcaccgtacataatgtccacttcagccgtacggaacggaggagcgactttgttttttacgactttaattctcgttttattccccatcacgtcgttgccctgctttaattgctcggcacggcgcacttcaaggcgcacggaagaatagaatttcagcgcgcggccgcccggtgtcgtctccggatttccgaacataacgccgactttttcacgaatctggttaataaagattgcgattgttttagatttattgatggcgccggaaagcttacggagcgcctgagacatgagacgcgcctgtaaaccgacgtgtgaatcacccatgtcaccttcaatttcagcttttggaacaagcgccgcaacagagtcaacgactacgatgtcaacagcgccgcttcgcaccagcgcttcagcaatctctagcgcctgctctcccgtatccggctgagaaagcagaagctcttcgatattgacaccgagcttttgcgcgtaaacaggatcaagagcatgctcagcatcaataaatgctgcctgtccgcctttttcctgaacctcagcgattgcgtgaagcgctacagtcgttttacctgagctttcaggtccgtatacttcaataatccgtccgcgcgggtatccgcctattccgagagcggtatcaagtgcaagggaaccgcttggcaccgttgaaattcttgtatccgttttttctccgagcttcatgatggaacctttgccgaattgtttttctatttgcttaagagccatatctaaggctgcctgacgatcactcatttattttttcctcctttatcttgccactacatatactataccttgtttactggcatttgccaagaaaaaagcgaacgcatattcggattttttccgcgttcgcttttctgcaaaagagcataatttcccttgtaaaacttaaaaatcagagaaaacgcctctttaaaactttatttttgatccagcattttcaaaatgagatggcagccgtatttagcggcgcgctttctgattccggttcttgagccggcaaagttaaattcgtgcacctcttcttttccttccgccgcaatgccgataaagacgcggcccggcgcatgcccttcctgcgggtcgggacccgccaccccggtaaagctgatgccgatatcgcttccggtcagctttctcacaccggctgcaagctctttcgcacactctttgctgaccgctccgctttctgcgagcgtctcagctttcacgccgagcacatgctgtttcacgctgtcggaataacagacaacgccccctgcaaatagttgagacgcaccgcttaaatcagtcacccactctgaaaacaggccgcctgtaaagctttcggcagaagaaatcgtaattccgttttgtctgcatgcttttgaaagctccttcaccagagacgtatcatcatatccgtagaaaaattcaccgacacgttctaaaatggcggcttccgtttcttttaaaagccgttctgtttctttttcgtcggcatgtttcgccgttaaacgcagcgtgacctctccgtcagcagcgagcggcgcaatcgtcgggttcgtctgcgcatcaatgatatcttctaaatcagcttcaagctgggattcaccgattccgaaaaaccgcagcacggttgaaacgattttctcattagaaccgagctttttaagaagcagcggcttcgcttcattttcaaacatcggacgcagctcgctcggcggcccgggaagcagcatataaagccttgagccgtgctctgcaagcattcccggcgccatgccgaaatgattcgccaaaacgtctgagccctcaatgacgagcgcctgtttgcggttattcggcgacatggtccgttttgttttcgcgaaatattcttcgatcgaccggaatgcttcgtcattcagaacgagcggacgccccagtgtgtttgcaatggtttctttcgtcaaatcgtccttggtcggtccgaggccgcctgaaaaaataatcaggtctgagcgctcttcggcaatgcggatgacttgcttaagccgctccggattgtcaccgacagcggtatgataaaacacgttcacaccgatttccgccagctctttactgataaactgcgcgttcgtattggcgatctggccgagcagaagctccgagccgactgcaatgatttctgctttttttgctatttccatctttaagtccttctttcttagttagatgtttttaacgcatcccagttcttcgcaaaataatcccagccggaaatgactgtgaagagcacggccacccataaagcgatatcgccgaacgggaaagaaacgagctcaaacggaagattatgcagcaaaagcgcggcaacagcgatgatctgagcccatgttttaattttccccagcatattggcggctacaacttcccccgttcccgccagcacaagtcttaatcccgttacggcaaattcgcggctgatgatgatgatgaccatccacgccggcgcaaggtcaaattgcacaagcgtaattaatgccgcggacaccagcagtttgtcagccagcggatctaaaaatttcccgaagtttgtcacgaggttcagttttctggcatagtagccatccacccagtcagtcgttgatgcgataatgaacaaaacagctcccgtaagatgcgcgaccggaatcgattcatcccctatatgaacgctgccccactgaaaaggaacaagcatgataatcataaatacaggaattaaagcgattcttgccagtgtgattttattcggtaagttaaacataaagcccctccaatatatgtactcggacgtgaagaaaaagtcatcttaatcgttcagatgacttttccccttttattttttcatcttgattgtgatggtctgcgccatcacatcatgcggattgagttcataggacagaacctctccgttgattttaattttcaggttaggggcatagcccgtgcggatttcaatctgcttttgatccgtgacgtcttttttaaaggtttcgcctttttgcagcgttccttcttttaaagaaccgccgctgtcatcacggacgcggatccatgcgctgtcagaagcaatcagttcaagcttatacttatctgccccggagacgttgtatgaagaagccgagccttccgttccggccgctttgatctccgtcttttcactgcttttttctttcttctgctctgacgcttttgtgtcctttttgtcttttttgctgtcagattgcgcttcgtcatttgtattgccgtcgtttttcagcgcagaatccttaggaatctcatacttgctctcactttgggtgactgccttatctccatctgtctgcccggatttgctcattccgagctgaataatcgcataaatgatcgcgatgacgataatgacaccgatgacgacaaggacggtcggaagccattccgccgcctttgaagcggacttaggaagctccctttgcatggcgagaccggagattttttccgacacatcatcatggtacgtgttagggatgtcttttttatattcttcaaataactgatctgaatcaagcccgacagcttcagcgtattgcttgataaacgcccgcacataaaaattgccgggaatgacgtcataattgccttcttccagagcggttaagtatcttttctgaattttcgtcgccgcctggagttcatccaatgacatccctttttcctctctggcttctttaagccggattgctaattctgtcacaacaaacaccttccaatattaaaaatcaaagcttgaaaaaccggtctgatcaaatatttgcggttcttctgcatgttcatatgtaataacttcgtcaggatcatttctgagttcgataatataatcgaaatcatcgagcgtatactccgaattttgaacaaaaatatcggggtgctccacgacctttgtcgccggaagccgcataatttcactgacgagctgaagatggcgctcagatccccgtcttgtcgaaacgatgccgtcgaggataaacacgttttccgtgctgtattcatcggcaaccagctggctccggatcgtttgttttagcagcgttgatgatacgaaaagccatcttttgctggcacaaacgcttgacgcaacgatggactccgtttttccgaccctcggcattccccggattccgatcagtttgtgcccttcttttttaaacagctcggccataaagtcaaccagaagaccgagctcgtccctttcaaaacggaaggtttttttgtcatcggcatcacgctgaatgtatcttccgtggcggactgcgagacggtcgcgaagcctcggttctctcagcttcgttactttaatggtctccattgtttttaaaattgattccaatcgtttaatttgatctatatgccggcatctgagcagcattccccttctggaaaggtcgacaccgttaattgtgacaatattaattgacagcatcccgagaagagatgaaatatccccgagcaggccggggcggttcacttgaatttcatattcaaaataccattcgagctttgccaaatgatataccccctccattgtggcaaatttttaccttcctttatcataaaacatttttctctaattagaaagaagaatgttgctctatagaggaaaacataaaaaaagagaggagaaatcccccctcttaatgagtgctgttattttcaacaagcttcaccatcatatttgcgatggcgcgctgttcatcttcagaagcaacgctccaaagatcagcaagcactttttcctgatggtttttcgagtcgacttcgttcgcaaggtaaccgccgatttctgtagcgaggtcagtgatcgtttcatcactcatccctttttcctgcgcatagttcaatctgtcaccaaggaaattcttccaattatcccagttttctaatactgacatgttgggttcctccatttcatctgttgttacaaaattattttgtccgtacagatgcaaactatacacacattttttcagcagtgccagccgccgtttacggataatatatgccccgtaatataggaagccttgtccgataataaaaaggccgccgcttcggcgatttcctccggctttgccagccggcccgcgggaatttcctctgccaacgcttctttttcatcagacgtgaactgatcaagcatatttgtgtcaacggcacccggcgagactgcattcacgcggacgccgctcggagcaagctctttggcaagcgctttgacgaacgaatgctgcgctcccttgaccatgctgtataatacctcgcacgatgcgcctgtttctccccagacggaaccgatcgcgacgatgcccccgctttttttccggatcatgccgggcatcagattacgcgccaaaaaaaacggactcgttacatgcagctgcaccatctcccgcgccgtgtcatccgtaacgtccgtaatcaggccgaaatgacttttgccgctgtttaataccagagcatccacaggctgcttaacggaacggctgagtgtctccgcgccatccggtgaggacagatccgcctgaataacggaggcttttacgccgaatgatgtgctcagcctttccgcaagcctgtgtgcggcttccttattagaatgataatgcaagaggacgtcatatccgttttttgcgaggacttcacttatactttgtccgattccgccgcttgctccggttacgagcgctgtctgtttcatcaatcaatactccttctttccccagaaaaacatccctcagggcgtgagggatgtttttgttatgattttggcacgactttgcagactgtcagcctgtcttctgatatttcttcttcaatgacccgctttacgtcatccagcgtaatctgctccagtacggttacgacatcaaacagactcatatctaaaaaggcgtagcgtgtgaattggttggcgatatattcaggcgaattgagcgcttttaagaatgacccgatcttcttttttctcgcaagatcaagtttttccgcagtcacggctgatgctgcatcaagcagcatgtgttttaattcgtcagcgagcttatccggctccggtgtatctcctccgacagaggcaaaaccgaatccgtattcagccgtgtaatcaaagctgaaggtctcatcaatgtagcctttgtcgtacaagtcaccgtaatgcggtgagctttttccgaagagacattcaagcatgaggttcatgctgagctcgtgcttcaacagctcctgccccgttttataagggtctttcgcctttaaaccgaccagacattttgagccttgcacgttcatttttaattcctgctcccggcggaaaaccgcttcctgctcctgaacttcttcacgtttgatttcaggctggtctgtaaacggctttttctcctggttttcccgcacctggctgatgaccgcttcaggatctacgggaccgacgataaagagcagcatattgctcgggtgataaaacgtttcatagcactcatacagcagatctttcgtaatatgagagatgctctccaccgtcccggcaatgtcaattttcacggggtggtctttatacatattttcgataaggccgaaaaacagccgccaatccggattatcatcatacatattgatttcctggccgatgatgcctttttctttttcaactgatttttccgtgaaatacgggtcctgaacaaaatctatgagtgtttccaggtttttctccacattagaagtgctggagaacagataagcggttcgtgtaaatgatgtaaaggcatttgccgacgccccttgcttactgaagtcctgaaacacgtcgccgtccgctttttcaaacagtttatgctccagaaaatgcgcgattccgtcagggacgtgtaccatttcttccttatttaaaggaacgaattgattgtcaatggaaccgtactttgtcgtaaacacagcgtatgttttattaaagccctgtttcggcagcacatagacatcaaggccgtttgccattttttcatgatacagcgtttcctgaagctgttcgaagtttatcggtttagtcaagatgctccccccgtcccttttaagaaataagtcgtatccagcttaatgttctttccgacattgataatgtcctcttttgtcactttctcgatattgtcaaggaatttttcgatcggtatctctacttgggctgaggcctgctgatacagaaattccgctaaaccgtatgccgtatcaatcgtttctaatacttgatttttaataacggctttcgtttgggcgatatcatcttctgaaaagtcaccgttttgcatagcctgaaactgttcttcaatgatggtgacggcctgcttgtaatttttcacctcaatgcccgacatgaccatcaaaagccctttgaagctttccacccttgaggccgcataataggcgaggctcgctttttcacggacatttataaacagctttgaatgagagaaacctccgaacagcccgttaaacacctgcaatgcaggataatccggatctgtatatgtcgtattggtccggaatccgatattcagcttgccctgcttgacgtcctcttcatcaatgacttccttcggatcgggctgttcattcgccgcgcttctttcaaaaggctgcagctcccgttcttccgttttaaaatacgtatcaacggccgttttcacctgatctgtatcaacatcgccgatgacgtacaggtccagctggtcttcgcgtatggctttttgataggcttcatacaaatcttgcggtgtaatgtgttcaacatcatcgaactcgccgttgacgtgaagcgcatacggttcgcttttgcacatttcctgaacgagacgcagattagaatatctcatcttatcatcatatacggcttgaatccgctgtttcagcgtccgtttttcctgcgtgacataaaggggcaggaaggcgccgttttccaaagcgggcgaaaagacaagctctgataaaagctgaaggcctttttccaataacggtgtgcggtccttcagatacttttcattaggaatctcaagtctgaacgtaatgacatgacgttctcccttttttgtcagatcagctgaaacggatgtgccgtacagctcatcaaaataagaccgcagatcagcggttttcgggcggctttctgttccgcgcagaagcacatgcggaaacagcgccctttttgttacgagctctttcgttaaaggagccagcattttaaacgtcagcgaaacggttttaaatttctcggtctttacgatgtgggcggtgatcccgccgtgctttgacttcatttcatttacgtaagtcatgtgaaacctccttcgttcattctttcatagtatgtattatgaccaaatttcagcattcgcaaaaaagagtgcgcagatgtaattatatcaactggaggatttataaggaaacaaaaaacctctgcccgaaaacaggcagaggcattgaacgttattttttcaaattgaaaggccaccagttggctcttccgaatattttcaccatgaccggtacaaaaaacggaaggacgacaattgcgtacatgagaaggcctgttaataccacggttgcaatctgtaataaggaaagaacgcctgacggcagcatggccgcaaaggttcccgctaaaataatggccgcagaaatgatgacggaacccatatttttcatactgctgatcattgcgggttccgttccttcttttttcagctcattaaagcggtccattaaaaagatggaataatccacgccaagagccatcaaaatgacaaagccgaagaacggcacggcccagtttacgcccggatacccgaagaagtgtgtaaagatgtattccgtcacgccgatggatgcgaaatacgtcagtacgagcgacgccactaaataaacaggcataatgagggagcgcagcatcacgatgagaatcagaaaaattcccgccagcataaacatggccgtccgtttgaagtctgaatccgatacttccttcagatcggcattcatgctggagactcccgaaacgccgaaggaagcattcttcagatccgtgttcggaatggccctttttacgctcgctttgatcgcttgaatatcttgaatggccgtatttgagtaaggattgttatcaagaacgacggtcaattctgtcgtttttctgtcatctgacatgtacgtattaaacacgcttgtgaaatcactgtttgtcaacgcgtctttcggcacaaaccagcctgtcatttctttgtctgacgccttgtgaagctcacccaggtaatcattcgcccccatcatgccgcttgatactttcttaagcccttttacactgtcgttaaggccggaagaaagttcgctgagccgggaagaaaaatcaccgagaccgctcttcatttttttctggccctcggcgagctgtcctgccgccgattcaaggcgcggcatttgtcctgcgagagccccctgtccgtctgacacttgctgcagaccgttttcaatactggtcagaccgttgatcattgcgttaatttgagtgtcaatcttcttctgagcggctgccagtcgggcaaattgtttttccgcttgctgcagatgagccttttgactgtcgacctgtttagaaaacgcttctgcatccgcgtttgccttggaaacggctgactgtacacccgtaaaggccgatttgatttcttggtaagagggatcggttttgactgacggtattgacgcttccaattttgcaaacggcagccgggcaagctgcttgttcaaatcggcaagctgtctgctggcttcatctttcatcggcaggacggtttttaccaattttaaagcgttttgcgtttctgaagcgagaccgctgttttgtttgagctgtgaagtcagcatttgtttttgctcttcaatccgctttctcatctgggcgacgccggctttattctcgttcacgccagcctgcagtttattcaggttttctcctatatcagaaagcccggatttcagagacaatgttccgtcaataagctgattgacgcttttgcccgactcttcgatctgcggctgtgaatcagctaacgactttgcggcatgccctaatccgtccgtgattttttcaagtcctgtattgcctttatcaagcccttcttgaagctgctttgcctgatttgtgacaaataattgattcaatccgtttccagcggggcgcgtggcgcttctgaccgtttttacaccctctgttttttcaagttctctgctgattttttcgatatcaatcaggtgtttttcggtatttaatgtctcatcatttttgatgacgactgtggccggaagaagttctcccgggccgaatgcgtctgaaatcgtattaaacgcgcggacggattcatatttatccccgatttcgtcaagactgttgtaagacagcgaccctttgtaaagaaggataggcgggacggtgaataccgcaacgattgcaagactgatgagcggccttttaaatgaaaaccgccctgacgattcccatgctttgctttgaggatgcgaaatatcgcccttaacaggccaaaacaggctttttcctaaaacagccataaaaaacggcacgatcgtcatgagcgcaagcagcagcaccgcgacaccgaccgcaacggccgctgccgactgatacagcttaaatgtcgcaaatccgatgcaggcaaatccgatcagcaccgcaccgccgctgtacaaaaccgtctttccggccgttttgtaggtgacgacgatcgcttctcttatatcagcgccatgcgacagctcttctttaaatctgctgagaagcagaatgcagtagtctgtgccgatcccgaacataatcgcaaccataaaaatctgagtaaaagttgagagcggaaaattcagctgatcgactaaaaatgcgacaatcgactggctgactaaataagatatcaatactgataaaagcggcacgaacggagcgaccactgaccgaaatacaaggatcagcacgatcaggataaaagcgaccgttatatattcagtctttttcaagccgtcctgtgagctttttaacacatcttcgtcgatcagcgattggcctgtaatgccgtatgatacgccgtacggtttcagctctttatcaattttattttttatttcgatgatatcgtttttggatgtatcaagctgcagctgaacgagcatcgtttgtctgtcttttgagagcagctgttttttaatatcgtcatttttctccccgaagtatgaagtcaccgttttaatctgaagcgcttttttatgttcagacaaagtgctgacggcttcttccagacgattttttttgtctgtcattaagcctttttcgtgaaatacgatgacggcagaagaagacggtgcatcggaatcagacatttcatcaagcaattcatgggcgtaagaagaggaatatccgtccggtacggaaatctgccctttctcccgtgtcaattcagccatatcaggcgctgtaagcataaatatcaccgttgcggcgacccacaccgcggcgatgatccagcgggctcggataatgtttttcattatgtctgctgatcctcctcagtcatcatcaatcgatataatttttcatatgtatttacgaacatttccgcctcgtcttcatcaaaatacataatatatgatcggacgagttcctcaatccgccgctccacacggtgaaatacttccgtccccttttccgtgacatttaaaagtatgctccggcggtcgctttggctgcgttctctattgatgtagcctttttcatacaggcggttcgtcatagatgtaatggcgcttttattgacgtggcacaccgcggccagttcaattgatttgcaatccggattgagcataatatagcggaggatgtaatattgatccaatgtcagttctttgttcactttttcagcgataatgctgtcaattttttttaagacgtgcaggtatacatcggaataacgctgaatcagctgctttactttttcttcatgcaccttttccccctccttccgatagttaatatgtttaactattaaaaagaataacgacttgacggtatcatgtcaatcttcaaaataaaataaaaaaagacagtgcagattacaccgtctttaatgattcctttttttcttttgcttgtgatgagatatttaacagcgctaaaaatacagacacaatgccgcaaaaagcggataaaataaaaatcagccagcctgcatttgacatcagggcagcaaagatcggcggtcccgccgctactccgataaaccgcatgctgttataaaatgaggtgatggttcccgattcctcgttgtctacgccttctgtgatgacagcgtctaaagccggcaatgccattccgataccgataccgctgacacacaaaaagataaataataaataaaaactgtgattccaccataggccgataaacgacagtgtcacggcactcattccgaaaacgatgcaaaacttcattttgccttggtcttttccgattttcctgcctgctatatatgaactgacggatagaaataaaagcgggattgccaaaagcgctcctttagccacaccgtcaatgccgtatttcttctccagtgagtctgataaataaaaaagaaccccgaacagcaaaaacataatcacgcagccgatgataaaaaccgtaaagagccagcgtccgtcacgcttaaatatgcggccgacatttttcacaaattcggaaatagaaggcgcttctttttgttcctccggctttgccaccaaaaacaatacgagaaaaaaactgatgagcgaaaaaaacggaatgaaccaaaatggcataaaccaaaaccatgcagccaagagcgaaccgagaatcgggcttattactttcccggcagtgttagacgtctcaatatcgccgagccccgcggtaatccgctcatcatcccctttgaataaatcaccgataaacggcatcactacaggagccgcccctgccgaaccgattccctgcagcacccgccccgccaagataatgggataaggatgcttgaacgcggtggaagctatcgcggcaagcgctccgcccgcaccggctatgagaagacaaggcagaagaaccttttttcttccgaatttatcggacagatatccggcaatcggaatacaaataatcgccacaatcgaatagaccgttataattaacgatacttgaaaagacgatatggacagcttcttttcaatcatcggaagcacaggaatcagcatggaattcccgagtgtcatcacgagcggtacagaagccagagcaatgatatttttcgttccatttttcttcttactcaacttattcacccattcactatacttggttgtttcctgttttattgtgccttgcagaaaacaaagtatgtactgaaacggcaaataaaaaaacagacacatgacgcgtctgtcttaaaaacgttttcttacaacatgaaaactgaacttatcagcccggaaataatttaatgaatacagcacaggttcatcattctgattatagtgggtttgcttcagcaataaaagcgccgtctccggctcgcattccaaaaccggtgaaatcgtatcgtgatatccgatcggttcgatatcagcaacggcatagctgatcacagatccggagtttttttccaaaagatcaaaaatagactcctgttcatgacagaaagaattcggcagaatgtgcatcggaatcgtatctaaacagtaaacgaccggagtgccgcttgccgttctcacgcgttccaaataaaaaagctcctgctcgggctcaagccggaatctagcgatatcttcatcagacggcgtgatgacctgagacgacaaaaaaatcgtacccggcaccatgttcgcctgctgaatcgttttcgtcacgctgttgagctgttcaatacctgaaagaaacagcggttttgtatggacgaaagtgcccacaccgtgccttctgataatcacatgctcctcttcaaggatacgcaaagcttcacgcagagttgcccggctgacacccattgattttgaaagctcaaattcagaaggaagcttttccttttcggtgtaaattccgttttgtatatcctctttgattcgctcaatcacttttagatacaagtgacgattgtcagcttttgtagacatgtttcccctccgtaaaccactttcataaattattgaacaattgggacaactatatcatgttttgataaaaaaataaataggaatgattttggtgatatcattttcagtgaaaactctctcctttttaagaagagagctcatcatattgttccttagataatagtacttccctcggtttgcttccttcatacggcccgacgacgccccgttcctccattgcgtcaatcagacgggcagctctcgtatatccgattctgaaccgcctttgaagcatggagactgatgccgtctgcatgccgataatcaaatcgaccgcttcgtcatagagatcatccgttacttcactgtgtgtttccgaaacttcttccggaatcatctcttcttggtactgcgctttttgctgcgtaatgacatgatcaacgacatgctcaacctcttcatcggataagaatgccccttgcacacgcaccggcttatttgcgcctacaggcagaaacagcatgtctccgcgccccagaagcttttcagcgccgcccatgtctaaaattgtccgtgaatcggtctgagatgagacactgaaggcgattcttgacgggatgttggctttaataacaccggtaataacatcgactgaaggccgctgtgtcgcgataatcaaatgaattcccgccgcccgcgccatctgtgaaagtctcgtaattgaatcttccacgtcggaagaagcgaccatcatcagatcggcaagctcgtcaacgatgacgacgatgtacggcagctcaggctgcttgacttcttcttcggcatttgaccgcttaatatgatcgttatagccttctatatttctcgtacccgtatgggagaacagctcatagcggcgctccatctcattgacgacctttttcaaagcctgcgaggcctttttcggatctgtcacgaccggcgcaagcagatgaggaatgccgttatacacattcagctcaaccattttcgggtcaatcatcatcatcttcacttcatgcggtttggccctcatcagaatgctcgtaataataccgttgacacagacgctttttccgcttcccgttgcccccgctacgagcaggtggggcattttgttcagttcggcaagcacggcttccccggaaatatttcgtcccaagccgatcagaagctttgcgtccggcttgtcattgagcttggattcaagcacttcttttaacgaaaccatcgcaacttcagcattgggcacctcgatgccgattgccgatttacccggaatcggcgcttcgatccggatatccttcgcggcaagcgcgagcgcgaggtcatcgctcagattcacgattttactgactttgaccccgacgtccggatacacctcatattttgtgaccgccggaccgagatgaacctgcgtcactttcgcctttacgccaaagctttgaaaagtccgttcgagttttcttgcattctcgtaaatgtttttcttatcggtctgctggccggtatgtttcgggtcagccagtatgtccaatgaaggcatttgataatctttattttcaagctctgtaaacgtcatcggcggagccgcagccgtttcgccactgtcttgagcgccgccggaaggctcatcttttaccgcttgtgcagcctcctgagttttttccggaatcagcggttcgacgggctcttcctgacggtctgaaaagcttgaaataatcggctctgaatggatgatcggcgaaatgatttcctcatcctcttcctccggttcaggctcttcttttttcttttgaacccgtttttgttttttgcccgattttgtttttgttttcggcgaagacatattcgttctgaccgtcttcatatcctcaagaaatgcctgccattgaccgcggataaaccggccgacggggctcgtccactttttgagcgtttcctgcagtgaacggcccgttacaagaatcagccccattaagatcagcacgatcgccatgatctgtgaacccgttgatgcaaataaaaagtgggaagctgcaaacagtaccgcgccgatcatgccgccgcccaaatcaggggaagcagcctgctgtttcatgtcaatcataaacagctcccacgtgttgccgatgacacttgccgaccgaatcgacccgtgatgagacagatttttaaagagctgcacgtgagacagcagcaatatactggcgataatacagtacagccctgcctttcttctcgttaaaaggcttggactcttctttttccaaaacagcgaaattccgagaaggaagagcgcaattaagcataaaataaaccactctccggcaaaaaaacggaacaagtacacaaatgtctgtcccacaacgccgagctgcaaaacagcaataattgagattgcaacacagagcagtccgcttagttcgtattttagattgagcttactctcttgtttctttttagatttccgttttttctttgccacactcatcaccttactgcgttaaaaaatgtaaaatcatacatcatgaagaaaagcagccttttgccggctgcatttttctgtaggattcccctattatagcatattttgcccccgagaaacggactgaatgccggttagattttcagcttgattttttgtcccggagcgatgtccggattcaagaaatccatcgggttcgtacttaaaatctgtacgacttcagcttcatttcccttcatctcaactagcagcggcacgccggcgtaatctacctgttcatgcacgctttgctctatatcctgaccgtaaacgacttcttggggcatgacggtataaaggatcattgaatcatccttccttcctcgctctttcgttcctcaatcagctgattcagcttttttatcgcctgtccgacgccgcccacggcatcaattaatccgtaatcagccgcatctttcccgactacgttcgtcccgatgtccctggttaagtttccttttgaaaacatcagctctttgaatttttcttcggaaatatttgaatgatgggtcacaaagttgacgacccgctcctgcattttgtccaagtattcaaatgtttgcggaaccccgataaccagacctgtaagccgaacggggtgaatggtcatagtcgctgtttccgcgataaaactatgatcacatgacacggcgatcggcacacctatcgagtgtcccccgccgagtacgattgagacggtcggttttgataaggatgcgagcatttccgcaatcgcaagccccgcttccacatcgcctccgacggtgtttaagatgatcagaagtccttcgattttcggattttgctcaatggcgacgatttgcggaatgacgtgttcatatttggttgttttattttgcggcgggagctggacgtgcccctcaatttggccgatgatcgtcaggcagtgaatattgctatcttgggacatttgcggcagagatgtctctcccagctgctgaattttgctcataatgctgtctttcgcatctgatttttcgggctgctgttcttcggtgttttccatacgatgatccattttatctttcaccctttccgaatgtctctttgtattatgaacaaagatgatgatttccatccgggacatgaacaaaaacaaagccggagcatcatgcgctccggctttgtatacattatacttccataatgatcggaatgatcatcggcttgcgttttgttttttcataaaggaattgattcagcgcatcacgcattgcttgtttcagcgtggaccattctacggcagatgtttccgtcgcttcagtcacgatagagcggacgagctcagtagcttgtacaattagaccctctgattctctgacatacacgaaaccgcgcgtaatgatctcaggacctgatacgaggttctttttctgcttatcgagtgaaatcacgacgatgagaataccgtcttgtgacaataagcggcggtctctcagcacgatgttgccgatgtcgccgactccgaggccgtcaatcagaacgtttccgtacgtgactttatccccgattttcacattctggccgcggaattcaacgacgtcacctttttcaatcaagaaaatgtcgctgcgtttcatgccgatctcttctgcgattttggaatgcgctttttgcattctgaattcaccgttaaccggaattaaatatttcggtttcagcaaattaagcatgagtttcaattcttcctgcgaaccgtgaccggacacatgcacgcgcttttgggcgaaaatgacttgagcgccggcgcgtgcaagcaggttgacggttttggaatatatcaattcatgccccggaatcggtgttgatgcaatgacaacggtgtctccttcttcaatgttaagctgcttgtgcgcctgcttggccatccgcgtaagagcggccagcggctcaccatggcttccggctgtaacaattgccacttcccgcttcggatattttttcacatcctgcacaggaataaacatttcatcttcggcttcaatatagccgagcttgcgcccaagctgaagcacgttttgcagattttttccggcgattgcaagtttgcggccgttctggacggcagcctgtatcacttgctggatccggttgatattagacgcgaatacagcaatgatgacacggttttctgaattgttcatcgcatcggaaatttcaccgcttacatatgcttcggacggagtataccccgggcgctccgcattggcgctgtcagaaagcagggcgagcacgccgctgtttccgattttggcaatttcgccaatatcacatgattggtgataagcaggcgtctggtcaaatttaaagtctcccgtgcatacaatagagccaagtgatgttttgaagctgactcccactgaatccggaatactgtgaatcgttttaaagaacgatactttcgttgattcaaatgtaatgactgatttagagtgaacttcacgcaaatcagcttttcgattatgcccgtactgcttgagtttttctctcagtaatgcaagcgtaagcttcgttccgtataccggcaccgacagcttgttcaataaataaaagacgcctccgatgttttcatcgtgcccgtgtgtcagaaagatggccttcacgcggtcagcccgttctactaagtaggaaatatccggaatgacgacatcaataccgagcatttcattttcagggtgcatcagccctgcatccactacaaatatgtctgagtcaatttcaatgacatataggttcttcccaatttctccgacgccgccaagggcgataattctgacgttttctgtatttttctttttcaaaatctgtatcctcctagtctcatacccgtccatcatcacttgttcctattataactgatatcaattttagaaaacaagaagaagcggaaggtttagggaaaaccaatatgtatacaaaacggtcaaactcacgataaaaatgagaatgaccgcgtattttaactgtataaattttttcttacagttcgctgatgacgctgctcaggctcagacgttcatcttcattcagcgggataagaggaagacgcacagatccgacatcaaggcctttcagctgtaacgccgttttgaccggagccggattaggcgctttaaagagctccttcatgatcggcagaagcttctgatgaatcagtgccgcggttgccgtctgcccgttcgtatagtttttaatcatctgctgcatgtcagaacctacgatatggctggccactgacacgactcctcttccgccgactgcgagaataggaagcgttaacccgtcatcacctgaatagacgtaaaaatcttccggtgtttcggcaatgattttcgtaatggcatcaagatcgccgctcgcttctttaatcgcagagatattcggtatctccgcaagtctgatggccgtttccggcgcaagcgaagcgaccgttctgcccggcacgttgtaaagcatcacaggaagagacgtttcttcagctatggctttaaaatgacggtacatcccctcttgggaaggcttattataatacggcgtgacaagcataacgcaatcgacgccggcttcttcagctttttttgtcagtttaatggagtctttcgtattgttgcttcccgtacccgcaataacaggcacgcgtccgttcacttctttgactgtaaattcaaagagtgcaattttttcttccgttgaaagtgtcggagattcgccggtcgtgcctgcgacaactaaagaatccgtgccgtttttcaacaaatagtcgattaatgtagacagtttttgaaagtctacattccctttactgtcaaagggggtaatcatcgctgtagatatatttccgacattcatttttttcacctcatcatgattcaatcacatttactttgaaagttcaaacacttcatgcagcgcatttacggccgttaccatatctttttcatgaacgagcacccatatcgtcgtatggctgtcggcagattgcagaatcggaatgcctttatcagaaagtgcggagacgatttttgacgtgacacccggaacacccattatcccggcgccgaccgctgacactttcgcacagctctccgtcactgtcggctcatatcctaattcagccaaaatgctgcgcgcggcttccgttttactgccggctacggtatatacgatttcactcggcgtaatgttaaagaaatctacgctgattccggcatttgccattgctttaaagacttcagtctgaacgttgtattgccccattttggcgggaaccttaaattgcgtcacatctttcacatgggcgatccccgtgatcagccgttcgaatacatcgctgccgatgttagacgaatgatgggacgtcaccaaagtgcctttgtcttttgaataagtggagcgcacgcggatcggcacctttgcctgcatggcgatttccaccgcgcgcggatgaatgactttcgcgccttgataggcaaggttgcagatttccgtatatgtgacgttcggaagcggcttagcattttccacgattctcggatcggctgtcataacgccttccacgtccgtaaaaatgtcgataaactcagcatctaccgccgcgccgagcgccgctgctgaagtatcgcttcctcctctgccgatcgtcgtcgtgtcgcctttttcagtcgctccctgaaatcccgcgacaacgacagcgtcatggctggcaagtgcagcgaaaagccgctctgttttcatttctataattttggcgtcagtatgctgggcattggttaaaaagccggcctgggctcctgttaaagctgcggcttttatgccgttttccttcagcatgctggaaaaaacaacggacgaaatcgtttctccgcaagacagaagcatatcctgctctctcggagaaatgtcggactggctgccgtaaaggagcccgattaaagaatctgtcgcgtacgggtctccttttcttcccatcgccgatacgacaacgacaactttataaccttcactgatggcatctttaatgtgtgctagcgcaagcttgcggcctttgtcatcttttacggatgttccgccgaatttttgaacaatgatcttcactattttcactccaaattagtctgacgtaacagaagagagcaggcagagccttactctcttctgttcgcctatagaaaatacgtttgttttatacgaggttcagtttttgcaggctttccgcgatttggactgagttccaagccgcgccttttaacaggttatcagaaacaacccacaaatgaaaaccgtttgctctgtccaaatctttacggattcttcctacaaatacatcgcatttgccgacgcaatcagcaggcatcgggtaaagctgctccgccggatcatcctgaagcgtaacacccggagcttcttttaaaagctgtttcatatcttcaacggttgcgtcatcacggtcaagctcaatgtaaacagattctgagtgccctgtttcaatcggcagtctgacacatgtcgcagccacttccagattcggcatatgcatgatttttttcgtttcattaatcattttcatttcctcaaacgtatagccgttatcttggaatttatcaatttgcggaatggcgttaaatgcgatttggtaatgctttttgtcgcctttaaccggcataatggacggttctgcgggttcattgtttaaaatcgcctttgtctggctgtacaattccttcgccgcttcattgccggccccggacacagcttggtaagtagatacaatgacttttttcaatccgtacgctttgcggatcggttcaagcgcagccaccatctgaatcgttgaacagttagggttggcgataatgccgttatgtttgtgcagatcaccttcgttcacctcaggcaccacgagcggtgtattttcgtccatacggaatgcgctggtattgtcaatcacgatggctccccgttttacagcctcaggcgccaagctttgtgatacgcttccgccggcgctgaataacgcgatatgaacgccttcgaagctttcaggaacagcttcctgcactgtatattcttcgcctttaaacgttactttcgtaccagcagaacgctttgaggatagtagtgtgagtgtttcgatttcaaagtttctgtcttccagtgttttcagcatttgctgtcctacggctcccgtcgctccgacaactgctacgtgtaatcctcttcccatctgtaaaactccttccgccaattaagcatcatttgttgaattgactttgcattttacgttttattttaccatagaatagtcacggattgaccgaatttttttattccggaatgattttctgtcatcatgattttttattcatgatggtgtacgagcaccggctgaacctgctggtgcaaaagagctttttctaccgtaatcggaaggagatccattctggcgacgagcgatgtcggttttttcacgtggtcgtcctggccgaacgggatgaaatatatgttttttgcagacatcagcctcattaaattcgttccgtttaaaccgagtccgtcgtttgtcgaaattccgagcacgaccgggcggccgttgcggatcgtggctttcgcagccataaggacggggctgtcagtcatcgcattcgcgagtttgctcattgaatttccggttaagggggcgatgaccatgcagtcgagcggaagtttcggcccgagaggctccgcttttacgatggaatcaatcgcctcaaagcctgttgcttcttcaatttttctgacccaatctcccccctccccaaagcgggtatcggtcgattgaacggttgacgtcacgaccggccggacttcagctccttgactgataagcgcctctatttgcggaaaaacttcctcatatgtgcagtgcgatccggttaatccgaatccgattcttttccctttcagagacatggttattccccctctttctttaagtctgccaaaagcttgctcaatacgttcgcaataatctgtccggctgttttcggggccacaattcccggaagacccggagcaagcagcgctttaatgccttgtttttcagcatatttgaaatccgttccgcccggacgggatgctaaatccaaaatcaaggtcttcggcgtcatgcgcgataaaacgctttgattcagaatcaagctcggtacggtgttaatgcagatatcaatatcatttacatgttcagtaagctcttcaagttgaaaaggagaaagccccatttccgttatacgggccaaatgagccgaactccgcgcgcccacttttaccttcgcccctaacgccgcaaacgtccgggcgatcgtcataccggtgcgccccatgccgagaacggcgacatttgatccgtgaatggtataatccgtatgctgaatcgccatcatgattgttccttcaacagtgggaatcgagttgaatatcgcgatatcgtcccgctcaaataatttcacaagcttgcggcccgcttcgctggcgatcccctcaagatacgcgttggagatgcctgaataaatgacgcaatgctccggtgtccgctcaagatagctctgctttaataccacttcttcatttgaaaaaaccgtggaaacaacgccttctccggtcgttgccgatacaggcaggatgatactgtctattttttgaaagggaatctcatcgattttgcatttgacggttcctgtaaaaccgtcatccaattggtcaaaccctgcaagataaatatcggcatgctgctctgtcagctttcttataatctcaagctgtcttgcgtcaccgccaatgatcgcaattgtcaatccggttaacatctgaaacgttcaccttctttacagttactggatcttttaagtgtcatcctcctcttcatcgtatgtgcgaagagaaagggcggtgaatgtacagcgtctttttcataaaaaaagcaccggctgtatgagccggtgcttgcaaaaaatgaataagatctactcttcgggaggcgtgatctcccccggaacgtctaaaatgatcatgtctgacccgattttttggatatggttccaggggacgcggatgtcgtggccttgttttcgcaatccgaaccattttaccgtcggtatcaacagcgcggtaatttgtccgtcctgttcattaatttccaaatcggtctggccgagcacgccgagccgctctgcccgtttaatgtccactatttctttacctgacagttcactgagcctcatgatagccacccccttgtactatatgacccggagcaaaaaaaaatgcctgccccgtatagaggcagactgcttttccgcttaagacgaggccggcatattgccggtcgggctgatgagcgatagtgcgtaatcatccgtaaataagcggcggctgaggccgttgacgctttccaggctgaccgcatttaattcagtgataatttcatccatggtcttatgctttccgagcaggagttcgtttttcccgttccggctcattttgctgtttgtgctctctaagctgagcattaagctccccttcatttgctctttgctgttttccagctctttcggggtgataccgtcacgttttagaaccgataacgtttcctgaatggtttcagacagaagtccgagctgattcgcgccggtgcctccgtaaatcgtcagcataccgctgtcttcataggaactgtgatagctgtatacagaataggccagtcctttatcttcacgcacatcctggaaaagacggctgctcatgcttccgcccagcacgttgtttaagacgatcaaatcgtaaatgtccggatctccgactttcaggcctttgaaaccgagacagagatgcgcctgttcggtgtctttttttctggtcagcttttcataatgaaactcaggctcgctgatgccgcttgctttgcccttcgcttcgtatgtaccgaaccatttctccacgtctttaatgaattgttccgttacatttccggcgacagaaatgacgacgcggtccggcgtgtaaaagtcatccatatgctgtctgagagaatcgccgttaaatgacgaaagcgtttcctccgtcccgagaatcgggtagccgagcgaatgattgccgtatgtcgctttgctcagcagatcgtggacaatgtcatccggcgcgtcttcatacattttgatttcttcatatacgacgttcttttcttttttgagctcatcttcgtcaaaagcagaatgaaagaacatatcagccagcacatcaagtgcgtagtttgcatgctcatccagcactttggcgtaatagcacgtatattcttttgaagtgaaggcattcacttggccgcctatccgatcgaaggattctgcgatttcacgtgcggacctggtatttgttcctttaaaaaacatatgctcaagaaagtgcgaaataccgtttgtatccggcgtttcatgacgtgaccccgtcccgatccagacgccgattgccacagaccgcaccgttggattattttcaagcacaactcttacaccgttttggcatgtatagcgttttatcaagtctgttcctcctattcaaagacaggcaactgccgcctgctacttcatcagcctgttttcatccattaagtcagacactgagccgagcgcgtagcctttttctttgatttttgcaatcagtgtatccaggcttttcgcagtcggatcagtcggatgcattaaaatcatggctccgttatgtattttgctcaacacccttgtttgtaaaacagcgggagacggtttttgccagtcaatggtgtcaacggtccacatgatggtgcccattcctttttccgccgcaaggtcgaccacggcttttctgaagctgccgcttggcggcgcaaaccatttcggcttcatgccgagcgtctcgctgatttgtgcattggttttgtcaagctgttcggaaatgcttcctgaagtcagtttgctcatatcagggtgattgtatgaatgatttccgatttcatgtccgtctgccgctatttttttccccagttcctgattgtttttcagccatttcccttcaagaaagaaagttgctttgacctggtgctgcttcagaataggcagcatttgctccacgtattcatttccccaggcgacatttatcaggaaagcgaccatcggtttgtcgggatttcctttataaatgggttcgggcgcgagagaatcaagatggactttcggttttacctgctcatagacaaggccgtcttcgtgaaattctccgtcctttttcatttgtttataggatttttccacattgacttttaaaccgttatatcccggtatattcttccatattttatcaatccgcgcgtcttgcggcttcacttcatactctgacgctttttgcagtaattcttcatagagcggatcttttgatgctgacacagttacagcgtcttttttcattgcgtctatgtaatcaactgtatacggattttttaacatttcaaacgaaacaaaaaaaagaaataaaaaaacggcaaacggcacgaattttttcaacatgtccttcccccctcaccacacattatgtatgaggaggacaaggtagaacccgtctgttgtctttctcaaaataaagaagccgggtctcccaggctccttgttaggttttcatttaagattgttgttgttcctgttctttttctttctcttcgcgcagcactgctttacgcgacagattcactcgtccctgtttgtcaatttcagttaccttcacaaggatttcgtcaccgattttcacaacatcctcaaccttgccgacccgttcgagcgctagttcagagatgtgaacgagaccgtcttttccgctgaagatttcaacgaaagcgccgaatttctcaatccgtttgactttaccgaggtaaagctggccgacttcgacttctctgacaagatcttcgatgatttttttcgctttttggttgctgctttcatcagtagaagaaataaagatggtgccgtcttgttcaatgtcaatttttacaccggtatcttcaatgattttgttgatttgtttaccgctcggtccgataacgtcacggattttatccggattaatgttcatcgttaaaattttcggcgcatattgagaaagttcttttcttgattcaccaagcgtgctgagcatgctgttcaagatttccattcttccttttttcgcctgctgaagcgcttcttcaagaatttctcttgaaagaccttcaattttaatgtccatttgcagcgctgtcacgcctttttccgtgccggctactttaaagtccatgtcaccgagggcgtcttccatcccttgaatatccgttaataccgtatagtactcgcctgatttcacaagtcccatcgcgatacccgcaacaggggctttaatcggaacacctgcgtccatcatggcaagcgtgctcgcgcaaatgctggcctgtgaagtggaaccgtttgattcaagcacttcggatacgaggcggaccgtatacgggaagtctttttcatttggaatgaccggctcaagcgcacgctctccaagagcaccgtgaccgatctcacggcgtcccggtccgcgcatcgggcctgtctcccctacgctgaactgcgggaagttataatgatgcataaagcgttttgattcttccacgcctaaaccgtcaagaatctgaacgtccccaagggcgcctaatgtacaaacgctgagcgcctgcgtctgtcctcgcgtaaacagcccggagccatgcgttctcggcagaaggccgacttctgaagaaagcgggcggatttgatcaacgccgcggccgtccggacggactttttcttctgtgatcaaacggcgcacttcgtttttcacgagtttagacagtgtctgtttcacttttttaatcgtatcttcatcatgctcttcttcttcgaatttcgcgacaactgcatttttcacttcattaatcgcgtcttcgcgagcatgtttttcgtgaacctgaatggcgctgagaagatccggctccgcaaggctttttactttttcgctgagctcttcgtcaatttcatacagttcgatttctgttttttctttgccgactgctgcgacgatttcttcttggaatgcgatcaggcgcttaatttcttcgtgaccgaacataatcgcctcaagcatgatttcttcaggaacttcatccgctccggcttccaccatgttgatggcgtcttttgtgcctgcaacgatgaggttgatatcacttttttcaagctggtcaaccgtcggattgatgacgaatttcccgtcaatgcggcctaccgtcacacccgcgatcgggccttcaaacgggatatcggaaacgcaaagagcgagtgatgaaccgaacattgcagccatttcagatgagcagtcctgatcaacactcatgacaatgctgatgacctgtacttcgttacggaatccgtctgcgaaaagcgggcggatcggacggtcgatcagacggctggctaaaacggccttttcacttggacggccttctcttttaataaaaccgcccggaattttacctactgcgtataatctttcttcatagttaacggtaagcgggaaaaaatctagcggtttcggttcttttgatgcggttgctgtgctgagcactgcagtatcgccgtagcggatcatgacagcgccgtttgcctgtttggcaagctggccggcttctactgtaagctgtctgccggcccaatctatggtaaagacatgtttctcttgtcccattcgattacgagctcctctcttaatgtgtgaaataatcaattactcctattatgaacgaaatgaattgaacatatcaatgtcaaagtagtatgtaaaaggatttcattgtttttttattattatttttttcgctttaatacgataaaaaagcgggaatcctcccgctttttacgattatcgacgtaagcctagtttgttaattaactcacggtaacgagttacgtctttattacgcagatacgtaagaagattacgacgtttacctaccattttaagaagaccgcgacgtgagtggtgatctttcttgtgagtacgcaaatgctcgttcaagttgttaattgagtctgttaggatagcgatctgaacttctggagatccagtatcagattcgtgtgttttgaactcgctgatgagttgatttttacgctcttgagtaattgccatcctgtttcacctccatatcataattagccccagttacctagcaaccgtcggtgacttcggattgccaagcaatggttttaagactacgaaacatatgatactaaaaatcgcgcccatatgcaaatcttttagaagaaaatttgtgtacttttgatgttttttccgttatttgctgaaaaaacggatcgcttcttgtttgtcttttccgatctgagccgtcagttcatcgatgccgttaaacttccgttcgcttcggattcgtttgtaccactcgattttaacgtcttctccgtatacatcctgttgaaaattaaacaaatgaacttcaattgacggctgatcgggacgcttttcataaaaggtcggtttgtagccgatgttgcagacgccttcatacacctcgccttttatttcggctttcactgcatacacgcctgtcggcggcacgatataactgttgtgcaggccgacattcgcggtcggaaaaccgatggtgcggcctcttttatctccgtgaatcacagtgccccggacaaaatacggctggccgagaagagtgtgcgcaagttcaacgtcaccatcctgcagcgctgaccggatataagtggagctgatctttctgtcctgctcggtctgtttctcgacagtcgtgcatccggccttgccgtttaaatcgtccggcagcgtctccatcgtgccttttccgtattttccgtacgtaaaatcgaagcctcccacagcgtgccgcgcgtttaaccctaaaatatactcctcggcaaattgttttggagacagcgacgcaaacgcctcatcaaactttacgacatacagcacatcagcgcctaaacgcccgatctggctgattttatcttcaagcggcgtaatcagatcctttggctctttgtccctgcccaacacatgggaagggtggggatgaaacgtcataacggccagcgacaggcctttttcttcagctatttgtctggctgttccgattactttccggtgtcccaaatgaacgccgtcaaagtagccgagtgccatgacagacgccggctgctcttctttttgtaaatgatgcggatgagaaatatgtatcgtcttcacagaacggtcaccttttttcttattgttcgcttttttgcatgagcactttagccggtttcagcagtcctttttttgaagggtgcggcatataaatggccacacattctccgtcttcagtacagaccgctatacgggcgtcagctgtcaacgcagaaaattccgccgggatgtcaaacactgacccgttttcagctttcttagctaatgtatcacttatgacccatttcggcaaatgattgagcgctctttcaatcggcacggcatgctctgcaaccatgccgtctgaaacctgctgttcaagttcctcaaacgtgaaacactcatcaaggctgaaatcgccggaagcggtgcggatgagatgcgacatatgcgcgggatagccgagtttttcaccgattgtcaccgccaatgttctcacgtaagtgccctttgagcacgtgactgtaaagcggaatgatgctgtgtcttctttataagtgacaggggaagtgagcgcgatatcttcaatcgtgatattccgcttcggccgctccacttcaataccggctctggcgtattcatagagctttttcccgttaacctttacagcggaatacatcggcggcacttgctcctgcggtcccttcagttcgtctaaaacggctttgatatccacttctttcagcggctccttgacaggttttacgctgaccgtttctcccgtctggtcttcggtcgatgtggagaaaccaagagtgatctcagcatcgtacgtttttgacttgtcggtgacgtactcaacaatctttgtggcccgtccgacacagatcggcagtacgcctgacacttccggatcaagcgttcccgtatgtccgactttctttgtttttaacagttttcttattttcattacacagtcgtgagaagtcatgccgaccggtttatgtaaaaggagaactccgttaaccatatgtctttcgctcctttgttatcaattgtatcccgtaaaacgcagaaaagaggacagacgacactcgcccatcctctttccttgttattcagacggtttatctgaatgcagttcgtgaatcaatgtttcaatacgattgccgtactcaattgattcatcaaattcaaattcaagctcaggcgttttgcggagtctgattcggctgccgatttcggaacggataaaccctttcgctttctcaagccctttcagcgcctcctctttctttttctctccgccgagaacggagatatacaccttcgctatttgtaaatcacctgaaacgcgtacgtctgttacagtgagaaatccgattctcgggtctttcagctttcggctgataatatccccgagctcttttttcatctgctcgccgacacggtttgctctcatactcaattcaatcacctctaagttaaaaccactctgttctagtgatcgtccgttctatttcgggaaaggagtcaataaacgcgagtacgcgctggatctccttttccgcctgaacgtgagaggaggagacgacggcgattccgaagctggtccgctgccaagtgtcctgatagccgatttctgcggccgacacgttgaacttattctgaaccctcgttataatccgcttcagaacggctcgtttctcctttaatgatcccgcatcataaatgatgcattcacattccgcaaatccgatcactttctttcgatttcctgcatgacatacgcttcaatgatgtcgccttcgcgaatgtcattgtatttcttaattgtaataccacattcatatccttgtgaaacttctttcacatcatctttgaagcgtttcagaacgtctacttccccttcgaagatgaccacgccgtcacggatcaggcggagtccgctgtcacgtgtaatgtggccgtctgttacatatccgccggcaatcgtaccgattttcgacactttgaatgtttggcgcacttcaacctggccgatgactttttcttcgtattcaggatcaagcattcctttcatcgccgcttcaatttcttcgatgactttgtaaatgatacggtgaagacggatatctacattttcagcttcagccgtgctcttagcatttccgtctgggcgcacattaaacccgataacgattgcatttgaagcagatgcgagaatgatgtctgattccgtaatcgcaccgacgcctgtgtgaatgattttcacttttacgccttctacttcaattttttgaagagcggctgttaacgcttcggctgaaccttgaacgtcagcttttacgattaaattgatgtctttgacatcgccttgtttaatttgttcaaacagatcatcgaggctcagcttcgctttgtcgctgcgctgttcttccagttgcttggaagcgcgtgcttcaccgacagaacgggctgttttttcgtctttaaagacgaggaattgatcgccagcctgcggtacgtcgtttaagccagtaatttctacaggtgtggacggtccggctgttttcacgcggcggccgagatcattgaccatggcccgcacgcggccgaatgtatttccgacaacgatcggatctccgacattcaatgttcccgtttgaacgagaagtgtcgcgacagatcctcttcctttatcgagctcagcttcaataaccgttccttttgcctgacggttcggattggctttcagctcttccacttcactgacaagcagaatcatttcgacaagctcgtcaattcccttgcctgtaagagcggacagaggaacgaaaatcgtttctcctccccatgcttcaggaacgagtccgtattcagtcagctcctgcatgacacggtcagggttcgcgctttctttatccactttattcacggcaacgataatcggaacctcagccgctttcgcatggttgatggcttcgactgtctgcggcataacgccgtcatcagccgctacgactaaaatggtaatatcagttacttccgcaccgcgcgcacgcattgttgtgaacgccgcgtgtcccggagtatctaagaacgtgatttttttgccgttttcttcgatctggtaagccccgatatgctgggtgattccgccggcttcaccttcaacaacttttgtttttctgatgctgtcaaggagggtcgttttcccgtggtcaacgtggcccatgatcgtcacgacaggcggacggatttgaagatcttcttctttgtcagcctcttcatatttttcaagctcagtttcttcaagcacaatcacttcttctgtttctacaccgtattcagatgcgatcagttcgattgtgtctttgtcaagctcctggttaatggtagccattacgcccagaagcatcagttttttaatgagttcagacggctctttgcccagttcctcggctaaagctccgactgttaaagagccggaaaacgtaattttctcaggaagctcttttttcggcttcagcggtttttgctgatactgatttttgttgttatgattgcgtttgtttttgtttttgttgttgttattcttcttgtttttgttaaattgattattctgcacgtcattcttctttccgtctcgaattttgtttggttgattcccagcaggctgctgattaatcccttgcggcttgtttttgttcgtttccgcaggcttctgagatgtaacgccggcgccgccttttttaaatttcgcatcaagctgcttaatggtcttttcttcaagcattgccatatggttatttactactatatccatgtttttcagcgcagtcaaaatttccttgcttgaaacattgatggcttttgcatattcgtaaactctcattttagccattcgttcacccccaaaaatattaatcgagcaagctgatcagcttattcgcaaaaccttggtcagtgacggcgacaacgacacgtgattccttgccgatagagcggccgagatcagcgcggctttcgacttttttataaggcactttataataattgcatttatcggatactttttttgcagtattcgcagatgcatcttctgtcagcagaacaagttttgcacgcgcatttctaatttcttttataaccaagtcctcgcccgacacgaccttacgagctcgattggccagacccagcaagggaaaccattccattccagacatgttattttttcaccttttccgccagttccagcaattcttcgaaaatctggtcatcgatttgtgattgaaattgattttgcaatgtgtttttctttttcgcagctaagatgcattctttctcaagggtgatataggcaccccgcccgttcttctttccggtcggatcgactgaaatctctccttctttagaacggacaattcggatcagttcctttttaggcttcatttcccccgttaccacgcatttgcgcagaggaattttttttcgcttattcacctaaagtcacctcttattcatccgattcggctgtttcaggctccataaagagaggctctaaatcgtcatcttcttcatgctctctcggatagatgccaaggtctcttgcatccgtttcacttttgatatcgattttccagcctgtcagtttcgcagctaagcgggcgttttgccctctttttccgattgccagagaaagctggtaatcaggaacgatgacagtcgtggctttttcttcttcgctgacgatgacatccagcactttagacgggctgagcgcattggcaacaaattcaaccggatcgtcagaccagttgacgatatcaattttttcgcctttcagttcattgacgatcgcctgcacgcgctggcctttaggaccgacgcatgaaccgaccggatcaacgtcaggatcatcagtgcggacggagattttagagcggtcgcccgcttctctggcaacggatttcagttcgaccgttccgtcataaatttccggcacttcgatttcaaaaagacgcttcaacagaccaggatgcgttcttgatacatagatctgaggcccttttgtcgttttttcgacctttgtgataaatactttaatccgatcgtgcggtttatagctctcattcggcatttgttcattgacgggcagcagcgcttcaatcttgccgagagacacgtaaataaacttgctgtctaagcgctgtacaattcccgtcatgatgtcttcttcacgatcgataaattctgagtaaatcacgccgcgctcagcttcacggacacgctgcgtcaccacttgtttcgccgtctgcgcagcaatgcggccgaagtctttcggcgttacttctatttcaacgacatctccgacaaggtagttcggatggatgtgctgggcgtcgtcaagcgagatttcaagtcttgaatcgtatacctcgtctacgacatcctttcttgcgaacacgcggatcgtgcccgtctcacggttcagatcgacccgtacgttttgcgcctggttaaaatttcgcttatacgcggaaattaaggcagcttcaattgcttcgatgataatgtctttactgatgcctttttctttttcaagaatagtgagagcatctaatagttcactgctcatgttagcggtctccccccttaaacactaatacttcattcattaaaatgttacagctaatcttgcgttagctattttttcatacggaatattgacccgtttctttcttgttttgaccgtcatctctattgtaacagtttgtccatcgaattcagccaatttgccttcaaacacttttaaaccgtcaatcggttcgtacgttttcatgtacacatttttgcccagtgatttttcgaagtcggcttttttctttaatggacgctcggctccaggagaagatacttcaagaaagtagttctgggtgatcggatcggcctcatccagcttttcgcttaacgcttcgctgactttggcgcactcctcaatatcaacaccgttctcggaatcaataaacacgcgaaggaaccagttttgaccctctttgacaaattcaatgtctacgagttcaagctgaaggtcatccagtatgggctgagccatttcttgaacggtatcagtcacttttttgctcatgtttttcctccttgtgctgtcgatatcatatcagccgttcctctgcataaaaaccctgcttcaaaagagcaggggcattgagaaaacgatggacatgtcgaggcaaaattgcctgttcaatacaaaagagcgggtttccccactctttgcctcggtaatcgttagcatttccaataaaactataccataaccatatatttaatgcaaatcaaactccgctcggaggctgtgcacaaagcttaaaacagagacagctgattttggtccggaagcgactcaagacagccgtgacggtctaaatactctaaaatggtttttgacacttttcctcgtttttgaagatcctcttttgaaaggaactccccttctttccgcgctttcacaatattgagagcggcgttggttccgagtcccggaattgagttgaacggcgggatgagactgttgccgtcaatgataaattccgaagcgctcgaacggtatagatcgaccttctggaaggaatagccgcgctcacacatttcaagcgcaagctctaacacggtaaggaggtttttctccttcggcgaagcatcaagccctttagagctgatatcatccatcaccgctctgatggcggtcgagcctttaatcattgtatcaatgtcaaagtcatctgcgcggacggtaaaatacgcagcataatataaaagcgcgtgatgtactttaaaataggcaatccgcaccgccatcagcacgtatgcggcggcgtgggctttcgggaacatgtatttgatttttttacatgaatcaatataccagttcggcacattgttctttttcatttcttcttcccattccggcgtcaggcctttgcctttacggacgaattccatgattttaaaagccagtgaaggctcaaggccctgatagatcaagtaaaccataatgtcatcacggcagccgatcacttcgctcagttcacacgtattgttgtgtatcagttcctgcgcattgccgagccatacgtccgttccgtgagaaagcccggaaatctggacaagctcggagaacgtagtcggcttcgtatcctcaagcatctgccgcacaaatcgcgtcccgaattcaggaatgccgagcgtccccgttttacagccgatctgctcttcagtaacgccgagcgattctgtaccttggaaaatcttcataacttccggatcatctgtcggaatcgtcttcggatcaattccgcttaaatcctggagcatccggatgacggtcggatcatcgtgccctaatatatcaagcttcagcaggttgtcatgaatggagtggaagtcaaaatgagtcgttttccattcagaccccgtcgcatctgccgggaattgtatcggtgaaaaatcgtaaatatccatgtaatccgggacaacgataatcccccccgggtgctggccggtcgttctcttaaccccggtgcagccttgcaccagacggtcgatctccgcgccgcgcatgtgcaggttgtggtcgcccgcatagcctttcacatatccgtaagccgtcttttccgcgacggtgccgatcgttccagcgcgatacacgttatcttcaccgaacaatactttcgtgtagttatgggcatgcggctgatactcacctgagaagttcaagtcgatatcgggtactttgtcacctttaaagcctaagaacgtttcaaacgggatatcatgcccgtcctttttcaaaggtgtgccgcaagacgggcagcttttatccggcaggtcaaaaccggaaccgactgatccgtcattaaagaattcggaatatcggcagctcgggcacacgtagtgcggagcgagcgggttcacttcagtgatttccgttaaggtcgccacaagcgatgaaccgacggacccccgggagccgacgagataaccgtcatccagagaccgttttacaagcttatgagagatgagataaataacggcgaacccatgaccgatgatactttttaattctttttctattctcgcttctacaatttcgggaagctcttcaccgtaaatgcttctggcgcgctgatagctcatttcacggatttcttcatcagccccgtcaattttcggcgtgtacagatcgtctttgatcggtttgatctcatcgatcatcgaagcgactttctgcgtattgtcaaccacgatttctttcgctttttccgcaccgaggaaggagaaagcctccagcatttcatctgtcgttctgaagtgcactttaggcagttcgtgtctgtttaacgggttggcgccgccttgggaagatattaagatcttccggtaaattttatcctcatcgtttaaatagtggacatttcccgtagccacgaccggcttattcaatttttctccgagcttcgtaatgttggcgatgatttctttcagcgctttttcatcccggacgagctcaagctgcagaaggtgtctgtatacttccggcggctgcacttcaagataatcatagaaggatgcgatatcttcaacctcttcaggagatttttgcatcatgccttcaaagacctcacccctgtcacaggcagagccgattaacagaccttctctgtatttattaagctgcgacctcggaatgcgcggcactcggtagaaatattgaatatgagaaatggacacgagcttaaacagatttttaaggccggtctcatttacggcaagcaatgtagcgtgataaggtcttgatctctgataagcattggattgtcccatattctcattcagctgatcatgataaaaaatgtctttttcagcggcatctttgagcattttcaacagcaggtagcccgttgcttcagcgtcaaaaaccgctcggtgatgctgggttaattcgatatcaaacttcttacataacgtatttaagcggtgatttttaaactcaggatacaggaaacgcgcgagttccagcgtatcaatgaccggatttttcgctttttccgttttcaaaagacgcttgtacgccacatttaaaaatcccatatcaaagctggcgttatgagccacaagcacgtcatcgccgatccattctttaaaatcccggacgacgtcaacgacatcgggagcgtcgcggaccatgtcgtccgtaatcccggtaagctctatcgtcgttgctgacagcggatggtgcggattggcgaacgcttcgaatttatcgataatttctccgcctcttattttgactgcggcaagctcaatgatggtgtcatacactgcggacagacctgtcgtttcaacgtcaaagacaacgtatgtgtcttcttccaggagacggtgagatggattgtatgcgatcggaacgccgtcatctacgatattggcttccattccgtaaatcattttaatgccgtgttttttcgcggcggaataggcatccgggaaagactgcacaacggcatgatcagttaacgcaatcgcttcatgtccccattttttcgcctgttcgacaagctttccgacgcccgttacagcatccatttggctcatcggagaatgcagatgaagctcaacccgtttttcgccttcaggagcggtgtcttcacgggttttggcttttatttcattcacgtcatttgcaatcatgacgaggtctctgacgaatgtatcgttttgaatgcttccccgcgccttcacccacatgccttttttcagcgttttcatcaaagcggcgtcttctttttctctggcgaacatttttactaaaatgctgtttgtatagtccgtgattttgaaaatgcagagcgtgcgtccgcttttcagctcgcgtgtttcagcatcaaacacaaacccctgcaccgtaattcttctttcttcatccatgatgctgtcaagcgtccggatttcttcgttctctttaatttgatagccgatgacaagcggtccggacggtgcctgatcctcatcgccctctttttccttcttctccatctcgataagcgcctgcatcgcccgctcctgatcttcagcaagcttttgctcgcggaatttctggacttcttggtcagatacgaaaatttcggtatccagctgcagttccggaaagccgaattggcggtagctgtgctgaatcagcgcgaagtatttatttttgagcgcagatgcttctgtatctgtttttgttttcacgatcagtttgtttcccttgagcttcggcttctgctgattcaaaagagccaccatcggcggcgaggttccttcaagctcttcaatacagcgtgtccaataatcctgtacaagctcctctgtcactgtagggtcgatgacctgaacagacgatgtgacacgggcgatgtgagcaaacgattgtgttaacctcatcatgaatgaatcatatatttgatacggcaaaagagccttaaagcgaaattggaaatgccaggccttttctgctttatggattgtcagtttatcaatctctccgtcttcaaagtatgtcatgaaggtatcatctgtcatattaagctggtgcagaagaatctgaaactgtcttctgtttactgataactgttccattcagacagtatccctcccttaaaacatcataagtgaaggtacctccgcaggtgatgaggtaccttcttttttctctattttaacatgattttgtatgattcgttatggtgattacttcgtcttgataaattcagaaagctcatccactgaaacttcggcagattcaccggttttgcggattttcacttctacgatgccttcgtcggcacgttttccgacagtgatgcggatcggaaggccgatcagatcagaatcagcaaacttcacgcctgcgcgttcagcacggtcatcgtataatacctcataaccttccgcctggaatttgccgtaaagctgttcagcaagctctttttgcgcttcgtttttcatattcagcgccaaaatatgaagatcatacggagcaacgcttttcggccagatcaagcctttttcgtcgtgatgctgttcagcgatggctgaaagcgttctggacacgccgattccgtaacatcccatcagcatcggctgcgcacgcccgttttcatcaaggtatgtcgcattcatcgcttcagagtaacgcgtgccgagtttaaagacttgtccgacctcaatcccttcagcgaaacggatcgtgccttttccgtcaggtgacggatcgccttcctgaatgattcgaagatcggcatatgcttttactgacgcgtcacgttcgatgtttacgtttcggtaatgacggtctttttcattcgcgccgctaacggcgtttaccattactttcacggcttggtcggcataaatctcaatgtcgccggaagcgccgatcggccccgcaaatcccggctccgtgccaagtttctcggctacttcttcatgagacgcaagctcaaccacttccgcgttcagaaggtttttcactttcacgtcattgacctcatgatcgcctcttactaacacgagaacaaatcggtcatcagctttaaacagcattgatttgatgcaggcgctcggctcgatctgcaagaacgaagcgagctcttcaatgcttttgacattcggtgtatcaattttctccaatgcctcgggtgtttcatctgacggctcgctgttcatgacaacttccgccatttccgtattggctgcgtaagaggatccatcggaataagcgatggtatcttcccctatttcagaaagagccataaattcatgcgtgtcttttccgcccatcgcgcccgagtcggcaataacgggacggacgtttaattcacagcgtgcgaaaatgctgctgtatgcgccgtacatgttttggtatgtttcctccagactttcttcagaagcatggaaagaatacgcatctttcatgatgaattcgcgtccgcgcaataagccgaaacgcgggcgtttttcatctctgaatttagactggatctggtaaagagtgagcggcagacgcttataagatttcacctcatcgcgcacgagagaagtaatgacttcttcatgcgtcgcgcctaaagcaaattcacggccgtggcggtctttcagacgcattaattcaggcccgtacgtataccacctgcctgattcctgccatgtttcagcctgctgaagggccggcatcagcatttccaccgcgttgattttttccatttcttcacgcacgatcttctgaatgttttgaatgaccctgtaagccaggggcatgtagctgtaaaccccgctcgtattttgtctgataaatcccgctctcagcagaagcttatggctttttgcttcagcatcagccggcacttctctcagggtcggaataagcgtcaaactttgtctcatgtcttcgcacctctgattttttactagtcaattataagaataaacgctggatatcgttccatgtgacaaccagcataagaagcattaagaaagctacgccgataaatacaacaaatgcttccttgtcacggtttatcggcttgccgcggattgcttcaatgaataaaaacagcagccgcccgccgtcaagcgccggtatcggcagcaggttgacgattcccaggttgatgcttaaaaacgccgcaaactggaataggttgataataccggtttttgcaacttgatccgtcatatcataaatgccgacaggacccgaaagcatatcaagcttaaactggcctgtcacaagtttgctcagattggtcaggatcgcttttgtgacatcaacggtagatgtcgcgccgtaggcaatcgctgcaagcgcgcctttttcagtcggcgcataagagccgaagcggccgattgtttttttattttcatcttttacagcttcaggtgtaaccgagatatgaaacgatttgccgtcccgtttgacggcgacatcgattttttttccgggattttcttttaccgctgtcacgatgtcggtccatgacctcattttttcaccgttaatgctctggatatagtcgccttcttttaaaccggcagccgctgcgcgtccattgtctgtcagcttcccgagctcaggctgattcgaaggcacgccttgaatgaatccaagcatgacgagaatgacatacgctaagatgaagttcattatcggaccggcagcaatcgccttaatccgcttccatacgggtttagacccgaattgtcgattgtaaggcgcaatctgcacttcttctccgtctacgataaaaaaagaggtctgactgacagtaaagcccgccagttcatcttctttcccctgctcgtacccggtaatcttcatttcgtgctcaagatcagccgtctccacctcgataattaaagcgtcgggatatttttccttttgattaatgatgactttttccacttcgtcatctttattaaaaagaagcccgacggtataaccgggtttgacttcgatcatctccgggtcttcaccggccatgcggacgaacccgccgaccggaaggagtctgatcgtatacacggtttcattctttttaaatgaaaagattttagggccgaagccgatcgcaaattcacggcaaaggattcccgctctttgggcgagcaataaatgcccgagctcatggaaaaaaacgagcgttccgaaaataataataaacgcgataactgtattcacgaacataccaccttatgtgagtattgaattaacgtatccccgggtgtctttgtccacttcttggatatccgcaagactcggatcctgaattacgctgtggcggtccaatgctttttcaatcaggtcctcaatcgataagaatgaaatccgtccggcaagaaaagcggcaacggcttcttcgttggccgcatttaaaaccgtcggcatcgttccccctattttacctgattcaaaggcaaattgtaagcagcggaacctttcaaagtcagctttcgcaaaatggaggcttccgatctcccataattcaagcctttttgtttcaggcagaggcagccggtccggatatgtcagcgcatattgaatcggcaccctcatgtccggatttccgagctgggcgatgacgcttctgtcgtgaaattcaaccatcgaatgaatgatgctctccttatgtaatacaacgtcaatctgttcatacggaatgtcaaacagccaatgcgcctcaatgacttcaagtcctttattcatcattgtagccgagtcaatcgtaatttttgcgcccatcgaccagttcgggtggttaagggcgtcggcaatcgttacagactcaagctcctgccgcgttttatctctgaaactgccgccggatgccgtaatgaccaggcgctcgatatttttgctctgttcgccttgcagggcttgaaaaatagcggaatgttcgctgtcgaccggaagaagaggaacaccgtatcgttttgcgtgtcctttcactatatgcccggcagtgacgagagtttccttatttgcaagcgcaattgtttttttctgttcaatcgctttcaaagtcgggattaaaccgacgcttccaagcagcgcattgaccacgatatccacttcgtccatgactgccgcttcaatcaggccttcttctccgatgccgatttgacattcatgagaaaaagacgcttctttcactttttggtatgtatccatgtcgccgactgctacatatttcggctgaaacgttctgatcaacgggatcgctttctcggcgtttttaccgaaagtcatcgagacgagacggaactgatcttgatgcatgcgcaatacgtctaacgtctgctcccctattgatcctgttgctcctaaaagacaaatattcttcaaaatgccactcccattctatgcgtccagattggtcttattttcatattagcctttctcatgaaaaaagcgcaagcagaaagtataagaacggcatgacaaacaaaaagctgtcaaatcgatctaaaatgccgccgtgcccgggaaggatttttcccgaatccttcacatcatagtgccgcttaagcgctgattcaaccaaatccccgatctgtccgaatacagacagaacaagcgtgatgaccaaaagaaccgggtatgaaatcggaaggtgcgcaaacagctgaaaaacagccgtaaaaataagggcgatgacaataccgccgagaaacccttccaccgttttgttgggactgatttcgggccacagcttccgcttcccgagcgactttccgacgaaatatgcgcctgagtccgttgaccatatgacaacgcaggcataaaagatatacaaaagcccgtttgtttcaatgtttctgatttcaataaaataatgaaaacacagtccgatatataccgtcgcgagaacgataaacccgacttcgtcaaacgtaaaggtgtttttcacgagcaccgtatagctgagcagaatcaatacagcgaaaatcgttacttccattttcgcatcgaaaaaatgatacttgtccggcatcatatacagccataacaacaagaggctgatcagacccggaaaagaaaaaaatctgagctttttcatccgcaaaagctcaaaaagcgctatacttcccatcacgtaaacaaatacggtgaacggcaatcctccgaaaataaccaaaaataaaaataatgccgctgccagaacacctgttaacaatctttgtttcatttccaccatcctctaaattccgccaaacctccggccccgctgctgaaattctcccactgcctgcagaaagtgatcttctttaaaatcgggccacaggacatctgtaaaaacaaattcactgtaagccacctgccaaagcataaagttgctcaatctgatttctccgctcgttctgatgagcagctccgggtcctggattgattctgtcattaaatgcccggaaaagagcgcttcatcaatgtcatcgatattcagcgtgccgcttttcacctgttcagccagtgcttttgccgcattgacgatttccgtgcgtccgccgtagttcaaagcgaaattgagaatcagcccgtcattttgttctgtatcttttacggccttctcaatcgccctgtacgtatgagaagggagcgcggattcatctccgataattttcacctgtacattttcctctattaattcaggaagatacgtattcaggaactcttccggaagcttcatcaaaaagtcgacttccatcttcgggcgcttccagttctccgttgaaaacgcataaagagtcagaactttaacgccgagctgacttgcgagctttgtcaccctttttaccactttcattccttcatgatgtcctgcaatccgagggagtgaacgcttcttcgcccagcgtccgtttccgtccataataatggcaatgtgtgcgggaatttcacccttcagtatgtcttcttttgtataccgttctaagttggaagccgcattctgctgattcttccaatttttgagtatgttgagcatgagattcctccgtcacccaaaaaggttgcgttgctgatgatcaatgtaatcaacagtattaacaaaaaaaccccctgtaaacatgagagggtcttttcacattatctattgtacatagtttttcattaaacttccatgatttctttttctttgtcctttgtgacgctgtcaatttttgacacatattcatctgtcagcttttgaacgtcttcactggaagcacgaagctcgtcttctgtgatgtctccgtttttctcaagttttttgaggtcatcgttgctgtcacggcggacattacggactgctactttcgcttcttccgcgtattttttcacgactttgacaagttctttacgtctttcttccgtcagagccgggatcgcgatgcggataattgtgccgtcacttgtcggcgttacgccaagatcagctttcagaatcgctttttcaatatcgccgattgccgttttgtcatacggtgtgacaacaagcatacgcgcttcaggcacattgatggaagacagctggtttaaaggtgtttgggcaccgtagtattctactgtcactttatccaatagagatgggttggcacgtcctgcgcggactgacgccaattcacgtgaataagcggcaaccgctttttccatgcgttcttttgtttgtgttaatacttcgtttgacaacgttatttcccccttacgatcgttccgattgattcgccgattacggcacgcttaatatttccttcttccataatagaaaagacgatcagcggaatatcattatccatacatagtgaagaagccgtagaatccatgacttccagcccgtcttttaacacatcgagataagataatttttcgtatttaacggctgactcatcttttctcggatcagcattatacacaccgtcgacattattttttgccattaagatcacgtccgcttcgatttcagcggcacgcagcgctgcggttgtgtccgtagagaaataagggtttcctgttcccgcggcaaaaataacaacgcgttttttctccaggtggcggatggcttttcttctgatgtaaggctcagcgacctgacgcatttcaattgatgtctgcactctggactgaattccgagcgtttccaggctgtcctgcagggcaagtgagttcatgacagtagcaagcatgcccatataatcggccgtcgcacggtccattcctaagtcactgcccgtttttccgcgccataagttgccgccgcctacgactacggccacttcgacgtcaagctcagcgatttcttttacctgtttagcgatggattggatgacagtcggattaatgccgtttccctgctctcctgccaatgcttctccgctaagctttaaaacgatacgattgtattttggtttttccataataacctccaagtgtaaacattgccgtttcctattatgcaagagaaaaaaaggtttgtaaatatagttttaaaaatagggaacacaagtagtgtcccctatactgcctgaaaagccgcgaaagattcgccaaggctttccgccattattttttcacttggttcataacttcttcagcaaagttttcttggcgtttttcaataccttctccaacttcgtagcggacgtaagttttaacagatgcgtttttcgcagccacaacttgtttcactttttcgtctgggtttttaacgaaagcttggtctaataagcaaatttcttcgaagaatttgttcagacggccttcaaccattttagctacgatgttttccggtttgccttcttgaagagcttgctgagtcagaatctgacgctcatggtttgcttcttcttcagacacttggtcgcgggaaatgtaacgaggatttaccgctgcaacatgcatcgcgatgtcttttgcaagatcttcgtcagttgttccgctaagaacggataatacgccgatgcggcctcccatgtgaaggtaagcaccgaacgcttcgctgtcttcttttgaaataacagcaaaacggcgaagagtgattttctctccgattttagcaacgttgcttgtgatgtattcttcaacagtagaaccgttttccatcttttgacccattgcttcttcaagatcagcaggagcgtttgcaagaaggtggtcagcaagcgtgttcagaagctctttgaagccttcgtttttcgcaacgaaatcagtttcagagtttacttctaagataacgcctttgttgccgtcagttttaataagagtagaaccttcagcagcgatacggtcagcttttttagccgctttcgcaattcctttttctctcagaaggtcgattgctttgtccatatctccgtcagtttcagtcaatgcttttttacagtccatcataccagcgcctgttttttgacgcagttcttttacctgctgtgcagtaatagccatttgaattcctccttatatgtgtaaacaagatatgtatagatacatttttcttgaaaaaaggtgataaaaggcagtccctcttatcaccttttgattaggttacgcagttgtcgtttctgtttcaggtgcagtctcttcagcagcttccgcttcttcttcgccttgcttcgcttcaagaatagcatctgccattttagaagtaagaagtttgacagcgcggattgcgtcatcgtttgcagggattacgacatcaatttcatcaggatcacagtttgtatctacgattccgatgataggaatgttcaatttgcgagcttccgcaacagcgatgcgctctttgcgaggatcgatgatgaataatgcatcaggaagatccttcatgtctttaattccgccgaggaatttttcaagacgctctaattcttttttcaattgaacaacttcttttttcggaagtacttcaaatgtaccgttttcttgcattttctcgatgtctttcagacgcttaatgcgtttttggattgtttcgaagtttgtcagtgtaccgcccaaccagcgttggttgacatagtacatgccagagcgtacagcttcttctttaacagaatcctgagcttgtttttttgtgccgacgaaaaggatttttccgccttcagcagcaaggtttttcgtgaagttgtaagcttcctctacttttttcactgttttttgaaggtcaatgatgtagattccgttacgctccgtgaaaatgtaacgcttcatttttgggttccagcggcgtgtttggtggccgaagtgaacaccagcttcaagcaattgcttcatagaaataactgacatgtgatttcctcctaataaaatggtttttttcctccgcttaggtcatttttgtgcagaactgccgtttgcagcaccctctgcataaatcgttaagcgtgtgtatttaacaccaagacataatataacacagctttatgcgacaatcaagaatcctttacagctttgccgcgaaattttaaaaacagctcgatttctgtctttccgctctgcatccgtttggcgatttccgcgggggtgagcccttgttcatataattctgaaacacgttcttcaaacgaatgcgcaccgttgttttcgtcactttcagcccgttccgttgcactgataagcttttccatgtggtccggaatatcaggctcttctttcggttccgccaggggttcggcgtcttctgcgtccggcgcttgacggctttttgcgtcttcgagtctttcattttcttctttcagctcaagcagaaacgctgcaagggtgttttccgtctcttcaagaatcttcttctgctggcgctccgtctccttgagggctgaaaacctcgtgtacagaataatgacggcataaagcagtacgccgtgaagcacaaagcttaaaagccataatagtgttgacatgtttttcactcgctaaccatgagttcattattgaattactttttcaagcagatgctttaatttaaacagcgcctttgaatgaatctgtgaaatccgcgacgtcgaaaggttcaggacttgtccgatctcggtcaaagtcagttcttctttatagaataaactgacgacaagctgctctttttcagagagctcgtgaattttgcccgcaagctgagcgatcagctcgtccttcatgattttttcttccggcggcacatttttgtcatctctgatcatcacttgaatattctcaccgtcatcctggtcgtgaagcttttcatcaattgataagagattggcaaaaaaaccttcattcatcgttgatactacgtcctgctccgtcatccccagctcttctgcgatctctgaaggcgtcacattccgaaggtagcgctgttcaagtttttcgatcgccgcttcgactttttttgtcttctcccgtgaagttctgggcagccaatcttctttacgcagcccgtcgatgattgcaccgcgaattctaaacgaggcataggtatcaaattttaaatcccggccggggtcaaatttttccagggcatcatataaaccaagcataccaaggctcattagatcgtctttatgcaccgatttcggcagtccgacggaaattctgccgacatgatatgtgaccagcggcatgtaacggcgcattaaatcatcaccggctttaggatctttccactctttccagcgcgaccaaagcacctgatcttcataattcaaggattgcattgttatccccctacctcatacctttattaaatcgttgtttcaccttgtttaacagttcgaatgtgcagcatgcaggaccttggctcaaattcaatcgtccggccgcttgagccgcccgtatcttcactgatgaccggaatgttatacaatgaaagctgctctttgatggccgctacattcctcggaccgattttcatcaggtcgttcgtcattttaaacttaaacatctccgctcccccggcgagttttgccttcagggcaaacttgcggcagccggctttcaaaagcatatcaatcgtcatcttaacggcggtgtccgcgtattttgcacggttgagctccgccgtttttgataaaccggagtccggcagcatgacgtgaacgagtcctgccgtttgtttgtctttatcgtataaaaccagccctacgcatgaaccgagtcccgaggtccggattttatccgggtaacgcgcgacttgaacatccgcaatccccactttaacgactgcggcttccgcacggctcataaagccgcacccaatgagacgaagagcttttcaaaagaatcatagtccgggagcataaacatgtgggctttgagctcctgccggctgccctggtcaaaaatagaagtatccacgacaatggcatgctctccgacttggctgagttccatcagcccttcactgataaccgcgccgaacatatcaagtgagatttccggcacgctcgggtaaatctcaagctttgtcaaatcagccaatgccgttaaataggaacctgctaaaatattgccgaactcatgtaaagcagaagaactcaaatgatcttcacccaactggtcaatatcaaaatccggatttccgatcagctctctgataaactgttccgcctgatggaaaggcatgatgagaaagatagagccggtcatgtcgccttccattcttaaaaagatactggcgaccggcgtttcagccccgccgaaaaaatcagcgagctcatcaaatgtcaataaagtcgcaaacggcacttccatgtctatctttctgttcagcagctgagccattgcagaagccgagtgacccgccccgatatttccgacttcccgcaaaatatccatctgctcttctttgatcgcttcaaacttactcatgttgtcttttcccctttaagcattaggctctccggacgcagatgccgaagcacctttatccagcaccgcatgcgcatcgataatattgaggagcctgttatcttgcttgacgatctgtttaatccacacatccgtttcctttgtctggctttcaggcgcggattcgatttcattttcatgcacggtgatgacgtcattggcctcatccacgacccatccgacatcagcgtcacggtaagaaatgatgataatccgagtctcttctgtgatgtcctgttcaggctgattcagacgttttcttaaatcaagaaccggggtaatcactccgcgcagattgataacgccgcggatataagattccacacccgggaccctcgtcggtttttgccacttttcaattgatttcacctgggaaactgagatagcgtattctttcccgtttatcataaacacaatcattttttcacctgttttgatttcagcagtcattcgggcacctcctcgtgtcgttttagtagatcagcgcattgcaatcaataatcagcgccacttctccgtttccgagaatcgtagcgccggaaatcgcaaagacgttcgtcaaatagtcgccgagtgatttcagtacgacttcctgctgtccgataaaagaatccacgacaaaagcagtggatttatcgccctttttcacgacgattacatggaactgatcggcatcctgttttgaatccgtaattccgaattcttttttcagatagacgatcggaacgatttggcctctgaaatcaatcacttctctgtcatgcgtctgcaggatatctttcttatcaataacagccgtctctataatagaagaaatcggtatcgcaaacgtctcttcttccagtttaatgagaagaacggatataattgaaagtgtcagcggaagctggatactgaaaagagaaccttggccttccgcggatttgacactgacagagccgccgagtgattcgagtttattttttacgacatccaggccgacgccccgccctgaaatgtcagaaatttgatcggcagtcgagaagcccggagcaaaaataagctcgtaaatctcattatcttcaagcgtttcagcatcacgttcggtgattacactccgctcgagcgctttttcaagaattttctttctgttcaggccggccccgtcatcttcaacctcaataaagacgtggttgccgctgtgatatgccttaagcacgacatgacctgattccggttttcctttattcacccgcacttcaggcgattcaatgccgtgatcgatgctgtttctgattaaatgaacaagcggatcgccgatttcatcaatcaccgtgcggtccagctccgtttcagctccgatgatggacaattcgattttcttgtttaattctttttgaagctggcggatcattctcgggaaacggttaaagacggtttctaccggcaccatccgcatattaagaataatagactgaaggtcgcccgagattctggtcaggcgttcaacggtttcagtcagctcattgtggtcaagctccttggcgatctgctcaagacgtccgcggtcaatgacaagttcttcaaaaaggttcattgaagaatccagtctttcaatgttgacgcgaatcgttttcgagccgctgtgatgcttcggctgttcttccgttttcgcttgcggcttaggctgtttctcagcctttttaaccggagcttccttcaccggttcagccgcttgcggtttttcggccgtttttaacggcgcaccggcagaaatttcgacattctccacttctgaaatgccgctgatgagttctttaatttcttcagcaggctgctttgtcaagaaacacacctgaaaatccgttccgaaatcttccgtctcaagcacttccgcggcgggtatcgtttttgcgacttccccggcttcattcagcttttcaaatatcatgtacacgcgcacggctttgagcatgcagctttcattcagggaaaccgttatttcatagcggctgaatccttgctcttccgcctcttcaataacagtccgttcgaactcgtcataattccattcagttgaagcctgttgttttgaagccggcggttctgctgtttcggctgaagccgcagtctcatgcaccgcatttacgtcgagcttcgcactcacttcagaaatatcacgtttgccgtctcctccgtcaataatggactgcaccatctcttcaagatgatcaagcgcttcaaacagcacatccagccaatctgatgtaacgggcatttctccgttgcggatggcgtccagcacattttccatcaggtgggttaaatgcgccagatctgtatatcccatcgttgcgctcatgcctttcagcgtatgggcagctctgaagatgtcatgcacaagctgaaggtctgccggatctttttccaacagcagcagcttttcgttacatgtctgtaagtgctctttactttcatcaataaagacatctaaatattgattcatatccaattgattcacaccctctcttttttcacacatccggtgatggatgccgcgatatcttccacatgtttaatctcatgaatgaggcccgcctttatcgctgacttcggcattccgaacacaacacaggattcgtccgattccgcaatcgttttaacgctgcctgttctgagcatttcttttacgccctcggttccgtcgctgcccatgcctgtcataatgacggctaccttttcgtaatcggataagcggcttgccgaccgaaacaaataatcggctgacggtttatgccggctttccgtatcatgaacgtcaagaatgatgcggagccttccgccttcctctgcaaccgtcatattttttccgccgggcgcgatgtacacccatccgtccttcgcttcttcaccgttttccgcttctttgacctgaatatctgacaaatggttgagtctgtctgcaagtgaagcggtgaagccttcaggcatgtgctgaacgacaaatacaggcgcctttaaatccttcggcagtttcggaatcaccttttgcagagcccgcggtccgcctgtagaggtcgcgatgaatacggcctgcttggcggattttgctttcggtctttcaaatcccgccaaagccggacgttccgggatagaagactctttcactgccgcctcaggtttttgtgcgcgggacagcccggctgcaatcaccctctcaatcagctgctctttaattttataaagatcaagtgaaatcgctccggaaggcttggtaataaaatcaaaagcgcccatttccaggcagttgatcgttcggtccttcccttgctgtgtctggctcgataccatgatgacgggaagtttatatatgctgatgatcttccgcaatgtatccgttccgttcatgaccggcatttcaatatcaagcgtgacaacatcaggcttgagaagctctattttcttcagcgcctcttccccgtttctggctgtcccgatgacttctatctgcacttccgcagccagaaaatcggtaatcatctttctcataaaagctgagtcatcaacgacaagcacacgaatcactgtaaagtcctcctcaataaaaaagaagataatctctcaataaatgccggtttctcttctcttggtttgttttcttccgtttgaaacaagacatccgtcagaagacggacggacctgctggcttttgcttgaggattttttattaaaaaaggcacctggtcaatgacggcttgacttactagcgggtcatcgggtatggagccggcgaaacgcacctccgcgcctaaaaacatgtgaatcgcatgagaaaggcggttgtacgtgtccagcgcctgtttttgggcgcgggcgcgattgacggcaatgtttacggtcagccgttcatccgcgagcaaaagatgtttgatcgcgctgtaggcatccataatggccgtcggctcaggcgttgtcacggcgagaatgtcttccgccgataaaataaacggcagctgctcttttgaaagtcccgctcccatatcaaacagaacgtaatcaaaatcgcttaatacagcggaaagaccattcataaaagccgaccacttctctctgtctgcttgatagatcgcctcaagccccgttcctccggatatgtagcgaaggcctttcggaccggaggacagtgattgagccaatgcgtgccgattctccatcacatcaataatggtgcgggaagaagcagcgccgatcagcacatcaatgttgcccattccgatgtcaagatcaatgatgagtgctttttttcctttttcctgcagggcaactgccatgtttaatgttaaattagattttccgacgccgcctttaccgctgatgacggctaatgtcttcgcttttttctcataaagctccggcttgatcatttgccgctctctcattttccttcttaatgactctgcctgatcgggtttcatgtcaaaagcatccttacaaactcttttggtgaagccgataggatgtcttcaggcacatcctgtccatttgtcaaataggcggcgccgattcttgattccgacagcacttgaaacacggagccgagtgaggcggtttcatccgttttcgtgaaaatgaattgattgaccggcacacctgaaaactgtttcagcacctgtttcatatcttcatattttgcagatgcggataatacgagaaaggattgtaagcctgattcaaacggaatcatctcttgtaattccgtaatatactgctcttctttaaagtttctaccggctgtatcaatgaaaacatggtcatattcagcgaatttttccagtgccttcagacattcttcctttgaatagcatacttcaagaggagcctgaagcagctccgcatatgtcttcagctgctcgaccgcggcaatccggtaagtatccgtcgtcataaaggcaatttttttatgctctgtcagcattgatgaggccgcgagtttcgcaagtgtagtcgttttgccggccccggttgaaccgaaaagcacgacgtattttgattgaatcccttcctgccacctgtctgccgaagggagctttttcactaacaaatcctgcagttttgagctgacattatcttcagttaaatctccggaaacaattgaagaacggagcaattcactgagtacggcgttttgcgtatgatcaggaagcccggcttgcttcaatagtctctcggctttttttaatggttcagggagcacttctttaaaatgcgccagttcgccggaaatactttgatccggaagacgcggcggctgaacaggctcagctttctccgccgttttcgtctttttcaattcttcagcggcagccggcggcgtttttctcgcttccctgacgtcacgatctaaaaccgctatcacttcgacggcctgctgcgaccgcagccccagccattttcgtttctttacttgtttggaatgtaaaataacggcatcattgccgagttcctttttgatttgcttcgcggcatcctgcattgaagcggctgtaaatttttttattttcattaaatatccaccactccaatgctctgtacttcaacatttgcttccagctcattataagaaagaaccggaagatcagggaaataccgttctaacagctgttttacatacattctgacagcaggcgagcaaagcagaatcgccgactcctggcggatggaaagctgctcggcctctttagcgacagaacggatgatgctgtctgaaacctcagggtcgagtgacaggtaattgccctgttcagtctgctgtaccccgtctgcaatcgctttttccacccggcctgagcatgtgatgaccttcagcgtttcatgctctctcgcatattgtgccgtgatttgtttggcaagcgactgtctcgcgtattctgtcaaaaggtctgaatctgtcgttaatcttccgtaatcggcaagagtttcaaaaatggtcaccaagtttctgattgaaactttttctctcagcaatttggcaagcaccttttgaatatcgccgacagaaagagggtttggcgtgacttcctcaacaagcacaggataattttccttcagatgatcgatcagctgctttgtttcctgtctgccgaccagttcatgggcatgctgcttaattttttctgtaatatgcgtagatacgactgacgccggatcaacaactgtatatcccagcatgtccgcttcatcttttgcagcttcactgatccattttgcgggaagtccgaacgacggctctatcgtttcaattccttcaatgacgtcatcttcaggcgtcggtgacatcgctaagtaatgatccagcaggagctctcctttagcgacttcattgcctttaattttcaatctgtattcattcggctggagcgcgatgttatctctgatgcgcacaaccggaatgacaagtcccaattcaagcgcaagctgacgtctgatcatgacgatgcggtcaagaagatcaccgccctgccccgcgtctgcaagcggcacgagtccgtatccgaactcaaattcaatcggatcaatatgtaaaagctgcacaacgctttccgggcttttcagttcatccgcctgagcctcttcttcaagaatttcttcctcttcttcgctcggcttatccgctttggacagcatgtaagcgccgaatgcaagcagaccggcgatcggccccgtcagcagaatgccgatcggtgtaagaagaccgagcaaaagtacagttcccgcagctacatacaagagcttcggataagcaaacagctggcctgtaatatcatgaccgaggtttccttcagatgccgctctcgtcacgacgatccccgtagccgttgaaatgagcaaggccggcatttgagaaacgataccgtcaccgaccgtcagcattgtaaagtgagacgcagcttcttgtatgctcatcccctgctgcagcattccgattacgattccgaaaataatattgatcatcacgatgatgatacccgcgatggcatcccctttgacgaatttgctcgcaccgtccatggcgccgtaaaaatccgcttcccgggcgactttttcacgtctgtgctttgcatcctgctccgtaatcatgccggcatttaaatccgcgtcaatactcatttgctttccgggcatcgcatcgagcgtaaatctcgccgccacttccgatacccgctcggcgccttttgtaatgacgataaactgaataataatcaagataatgaagacaacaagccctaccagcacatttccgccgacaacgaaattcccgaatgtctcaacaacctttcccccttctccgtgagaaagaatcgaacgtgtcgtcgacacattgagcgaaagccgaaacagcgtcaataacagcagcaatgacgggaatatcgagaattgcagcggttcttgcatattcattgtggtgagaagcacgatcaacgcaagagagatattaatgatgatcaaaatacttaacaaccatggagggaatggaatcaccagcattgccacaatgaggacaacacttattaaaaccgataaatctcttgttgacatgctgtttttctctccttttgaatctgaaattcactatactttttgtttcgttttatatacataagccaaaatttccgcaatgactttgaaaaactcttccggcacggcctggtcaatgtcaacctgatcatataacgcacgcgcgagcggcctgttttcaatcgtcatgacatcgtgttctttggcgatctgtctgatttttaatgcgagatggtcgaccccttttgcaacaatgtaaggggcgtccattttcttttcatcatattttaaagctatcgcataatgggtcgggttggtaatgatgacatccgctttcggcacttcctgcatcatccgcctcatcgccatttcccgctgcttctgcttaatcttggacttgataatcggatcaccctccgattttttgtattcatcttttatatcctgttttgacattctgatatttttctcataatcaaaacgctgatataagtaatcaagcccggccagcagcattaaagcccctgatcccgcaagccccatccaaagcgtgagcttagaaacgaaagtgagcacttccgcaggcgttaaaagcggaaggcggagaatatcgccataatgcagccagagcaccataaaggcggcaaaaccgaccacagtaatcttcaaaatggatttgaccagttcaacaatcgccctcatgctgtaaatccgcttaaatcctttcagcgggctgagcttattcaagtcaggcttgaggacttccgcagaaaacagaaaacccacctgcatgtaattgctcacgacacctgccacaagcgcgaccagcataatcggcgcgaggatgaggctgatatctttcaccgtatccacgaacagttcatgcacggcagatgcagacagatgtaatgatatcgatttcgtataaaacgttttaataaaggacagcagcctgtcccgcatataaggaccgagcgcgatcagcgaaagaaagataatcagtaaagaaacggctgtattcacatccgtacttttcgcgacctgtcctttctttcttgtatccttccgttttttcggcgtggctttctccgttttttcaccggcaaagaattgcagattcagtctgagtctcatcatgtcacaccgaccaatgccaatagattccgcatggtttcaacggtaaggctgaagatgttgcggacgacgacaaacatcaccgacatacaaacgatcagcataataaagctcacggctattttcagaggaagcccgacaacgaaaacattcagctgcggcaccgttctcgccacaatgccgagcgccaaatcaactaaaaacagactggccacaaccggcgcagacatttgaaaagcgataataaacatggcattgaagctttttgcgataaaaagtccaaagtgatcatttccaaacgacggaaatgcctgatcaagcgggatatactgaaagctgtaataaatcccgtccaataaaagataatgggcgtttacgctgagcataaataacagcgccagcgtataaacgaattgtccgatcagcgggctttgcgttcctgattgcggatcaatgacattggcgatggaaaagcccatctgaaaatcaataaaggaacctgctatctgaatggctgtcatcatcatgaaagcgatcagcccgaggctcaagcccacaacggcctcttttatgacaagcagcatatactgttcccctatttctatttccggcgcatgtttcagcgtgctgaagcagatcaccgaaagaaaaaaagcaaagccgattcggtgaaccgccggcagattccgatgtccgaacaccggcaccgttacaaaaaaagcagagattctgataaagaccaataaaaaagcgggaaataaatcaatgatggaattcatttgattctaccctgcaaatcggttcagatgagaaaacagatcagttgtgaacgaaagaatcgtcgacagcatccaaggaccgaaaaagatcagtccaagcatcaccgccacgattttcggaatgaacgcaagcgtctgttcctggatttgagttgtcgcttgaaagatactgacgagcaaaccgacgatcagcgcgatcgcaagcagcggcccgctgatcattagtgttacatatacggctttttccgccatggaaattacaaattctgaactcacaattagcacctaccctaaaagctgtcaagcaaagatttcacgattaaataccatccatcgaccaaaacgaaaagcaatattttaaagggcagagagatcataaccggcggtagcatcatcattcccattgacattaagacgctcgccacgaccatatcgataattaaaaacggaataaaaatcataaagcccatttgaaaagcggttttgagttctgatatcgcataagcgggcaccatcgtcgtcaaaggaatatcctgaatcgattcaggttttttcattttggcatagttcataaacagcgccagatccttctgccttgtatgcttgctcatatactctttaatcggcttctcggcttttgtatatgcttcatcgagactgattttattgtccatcagcggcgttaaggcttccttattaatctctgaaaaagtcggcgccataataaaaaacgtcaaaaacagcgcaaggccgattaaaacctggttgggaggcatgttctgcgtcgccagtgaggttctcacaaaagacaggacgatgacgattctcgtaaagcaggtcatcaaaatcagaatccccggcgccactgaaaagacagtcaaaagcagcagtaatttaacagtggagctgacttcggtcggactgcttgaattaaaaagattaataaattcattcatgatgataagggcctttcttctttccttcagaacggctttgtttcagctcgttcagctgttctttcagcgcttttgaaaacgacggaagcatcgtttgcggttttttttctccatccttacgcggatttacgagcttggtccattccacttttgaagacatcgactcttcgtattggctcagaatcgcctcgcgctctttttcatcttcaatttcttttaaaagctgtatcgtttcgcccacaccgactacgagaacactgtttcccactttaatcagctgcacggaacggttttggccgactgacgttccgccgatattttctacatattgaaacggcttcagcagacggtttcttctattcatcagtttgacaaatccatagatcagcagaatgacgaataataacgccccaatcatctttacaaaatcaaaagcggagacagaagatgcagaagcatcccctatctcttgatcagccgtttgtttcgatgtatcgctttttttctctgttttgtttgttgattgtttgtcaaaccattcgttgacggtggaattgtcagactccgccgcaaaagcagggaacggatgtacattgagtaaaacgaaacaacaaatcaaagctagtaaaccatgactctttttcaacagtcgtacaccctttagcttaatgttttattaatagcttcaagcacgcggtccgcttggaacggtttcacgataaagtcttttgcgccggcttgaatcgcgtcaataaccattgactgctggcccatagccgaacacatgatgattttcgcctgcggatcgatttgtttaatttcctttaaagctgtaatcccgtccatttcaggcattgtaatatccattgtcacaaggtcgggggaatgctctttgaatttttcgactgcctgcgctccgtctgaagcttcagctacaacgtcaaaaccgttcttcactaaaatatctttgatcatcattctcataaatgctgcatcgtctacaattaaaattctgtgtgccataatctgtttctctcctctatgttcgcttattttaaattgttaaggcggtctgcctgacttaaaatatcagtgactctcacgccgaagttttcttctatgacaacgacctcgccctttgccacgatccgctggttgaccagaatgtcaacaggttcaccagccagcttgtcaagctcaataatgcttcccgcagaaagttcaaggatttctttgacgcttctcttcgttctgccgagctcaaccgtaacggaaagcggaatatccatcagcatatcaaggttattccttgatccttgcgccgcttcgttatgatcaaatgcctggaattctaccggagcgacttgaacaggagcagctttttttgcggttccctgtctcttcggaagctcgggttttgcctgcggctccggctgcatggcaggttccggctgcggcgtttcgtatgtttgctgaggttctgatacagtttctgcggcctctgactcatgctggtctgcagtcatcaggtctgcgatcagatctttcgcaaacgtaatcggataaagctgcatgatgctcgaatcgattaattcgccgactttcagacggaatgacacttttacgagcaggtcatcctcaggtattctgtcggtccctttttcttccgtcacatccagaagttcaacccttggcggagaaatgtcaatctttttactgaacacggtcgacattgacgtagcagccgagcccatcatttgattcattgcttcctgcacggcgctcaggtggatttcaccgagtgacggatcggcgccccggccgtccccgccgatcatcaaatccgcgatgatggccgcgtcgctttgttcgacgacgagcaaattgctgccgtcaaagccttctgtgtagttcacttcaatggcaacatacggatgaggaaattcatcactgattttgctttttgaaatgacggtcacactcggtgtcgtaatgtccactttttgatttaaaagagtggacagcgccgtagccgagctgccgaacgaaatattcccgatttctccgatcgcatcgcgctcaagttcagacaagttcgccccttgaggctgttctgtatcctctgactgactgcttgtgccgttaagaagagcatcgatttcatcttgagataatctattgttcatcttgttcacctcttatgtcgtgatctaaaatttgcactgcctgtcttcgattcacccggccggcctgccctaaaaacttcggtttgtttccgaccaatacagtaagaggatcagtcactgatttgtccagagttatacagtccccgacttccaaacttaaaaattcttctattgtcagttcagaagcgcccaagagagccacaacgggaatttgagccgtcatgatgcgcttttcaagcaacttcgtttcttcgggcttcgcttcattccggtctgattgcatccaataatgtacggaaagcttagggataatcggctcaagtacgacatggggaatacaaagattaatgacaccgctgatttcacctatctgcgtattgagagaaatgacaacgactgtttcatttggggaaaccatctgtacaaactgaggattcacttcaaattcagtcatttcagggtcaatatcagcaatcgattgccacgcttctttgtagttgcccagtgcattttcaaataagttagaaataatattcgtttcaatttccgtaaggctgtcagctttgttatgagtgatgccgatgcctcccatgacgcggtcaagcattgcgtatgcgatggtgggattaacctccatcatgattctgccttccatcggatgaacatcgaataaatttaaaatcgtcatgttcggtatggaacggataaattcttcatacggcacctggtcaactgagctgacggatatatgaatatacgttctgagcttggcggaaaagtgtgttgtgagaagcctcgcaaagttatcatgtatccgggttaaactgcgtatctgatctttcgagaatctgagagcccgtttaaaatcatatacctttacttttttctctttaacttcctttttcagctcttccgcatccgcctcacccgtggaaatggcggaaagcagtgcgtctatttcattttgggagagaacttctcctgacattttcttcacctccgtattctgtcaaatttgtttttattgcagattaaaggaggtaatgtacactttctgaacttttccttcttggagatagctgtttactttctcttttaatgattgtttaaacgcttctcttcctttatctccctcaatctctccggcgcttgtgtcagctaaaatggaaatgatgttgtctttcacctgaaaatcgcgtttttcaagttcttccttcgctttagccgagtcggtttcaagcttgatgccgatacggatgatgctgtcagactttaagtttgtcgtgatatcgtcgacagacacagtggctgcaacgacttcgtcaattgtcggctttttatctttgccggaatttccgctgacgacaaaatatgctgccgttccgaggccggcaatgacaattaaaataatcagcaaaatgatgactaattttttcttcattcttcttcctctattccctgatccagtgaaaatatttgtatgctatggtaaaacgatatgacttttttgagaactgcttcttccggttctttcactacgaactttttgccgttggacagtgtaatcgtcgtgtcggggaagcactcaatctgttcgataaacagcgcgttcagcgtaaaaggctggccgtttaaacgggtgacttgaatcatgcaatccggagaagcggccttaccgcctctcctccctccttaccgtttcagattaaccagctcctgaaggatttcatctgaagtcgtaatgatttttgagtttgattggaaaccgcgctgagcaacgatcatttcggtaaattcatctgtcagatctacgtttgacatttcaagatagcctgccaaaagcttacctgttccgttttcgcccggagtggtgactgcgcttgcagctcctgaacttaatgattctctgtaaaggttgcctccgattttttccagaccggcgctgttagggaacgtgaccagaccgatttgtccggcatcatgaacctcatcccctgcatcagtgtatgtaacggttccgtctgcaccgatgctgtaatctttcgcatcagtcggaatattgattttgccgccgccgattttttcaagatagtatccgtcagtcgtaacaaggttcccttgattgtcctttccgaaattccccgcacgtgtgtaaacaattcccgcacctgtattaatctgaaagtagccgtctccgtcaatggctaggtcggttttattctgtgtagcctgcggggcgccggttgaatgaacaacatcaatggaagaagtcgcggcacccaagccgatttgttttgaattggtcacgtttgaaccgccagcgactgtctggctgatcatatctttaaatgtaacgcggcttttcttaaatcccactgtgttgacgttggcgatgttattgccgattacatctagttttgtctgaaagtttttcatgccgctgataccggaatataatgaacgtaacatgttaaattccccctgagtttcttattatttagatgtttcgctgacggccgtgacattccacggactgacctctttgccattttcaagcacgagcacgtaattgccgtttgaatgcttgactgaattgactgggcttgtctgatccttcccgtcgctgtcgctgaatgtgacatttttgccgatccagttcacatacatcgtaaacggatcttgattttctacaaatttagtcatcgtcgtattcatattcatcatttgctccaatgaagaaaatgtcgccatctggctgatgaattctttgtcatcaaccgggttgagcgggtcctggttttgaacctgtgtcattaagatcttcagaaattcgtctttccctaaattcgtgctgctgtttactgcggcggtgctcttcgcgcttgaagtggttgaagcgcccgccgcggcataatccgagtttactgatgtcaactattcttcctccatttcattgagagaaagctcctccagcatatctccgaaatcgcctgactgctgctggttcttctgctctctctgtccctgatgctgctgtttattgtgatcggccgtctgcccgtaaacaggctgctgatccccgctttgaagggggactgtaaaacggtcgacctggaccgccatattcggaagcgactgtttcagctgaggaagatgctgttccagcagctctttcgcggactggctggatgcgattattttgctttgaaacatcccgttttcgtttgtcaccttaattgtgacaaatccgaggttttcgggattaagacgaatcgtaaagcttccggttgttttcccgaaaggcgtgtatttcatctgtttccagccgcttatgacctgatccgttaacggtttattttctgccggctgctgttcagctcctgcggacgtttgctgaatgccggcaaggcttctcgttcccgacaacagtatatgtgcagacaatttgctgtcaggcgcctttgcgtgagaaaccgtgccgccgttttgctgttctgttttcccggctgactcttgggatgattcagatgattgagataacacaaaagctttcagctcagtttcagccatatcccattcctttgttcccttttgagaaaggcccgcaagctgctccgcgacgctttgaaagctcttcagctcagcggctgtcatggagtaaagtttagatgcagattcgtttttcggaaaaaatgtctgccgcaggtcttgaatcacgcggtctgggacaccttgttttttcaatgcctctaataaacgggcgccttcctggtaaaccgcctttgcctgcgcgctgtccggcagttcctgctgagatgtgaagagctgggatacagcttcttgaatgaaaagcagccccttctcaagcgcatccttgacggaatccccgtcttttgcgtaagaatccggctcatccgtttcaggcttcgctccatgctgttttcccgctaacatgtcttcaacagattcggcaagctgtttcaataaaggaagagctgtttcagccgtctgctttccttcaagagcttttaccgcctcaagcagctgttttagctgcaattctttatcttccgggccggctttcagccaatcaccgattttcgataaggcatcattcagctctgcgtcacttgtttttgtttcatctccgggctgccggggagaagtgatttccgacaggagccagttctgaaatagacctaagctgtttacattcatcttcacattgctgttttgcacagtctgcgtacgattacccgttaattcaagcagcttcaacttacatcactccttatttccgtcagcggatagtttttctgtatatttagccgcttgttcaggagtcattttcgtcaagatttcagcaagctgctttttacttaatccgtttaaaatatcgagggcttctttttctttcagctttacgataatgcttgccgctttaccgctgtccatacttttatagatgttgatcattttatcttttccggctgaatccgcagcgtcttttttcgtttcatccgtcttcgttttctgctgctgttcagcttcctgtttcagtgaacggattttctgattcagattatcgatttcggacttgcttgtgtctaaatctttattcaaaatgttaatttcacttttttgttcctttatggtcttttcaagagaagccgttctgtcttccttctgcttttccgccgcgcttttcatttctttcgtttcgggaaccaattcttttaaaacaggcgttttagcggctgtttcctgaatcggcttcatcacatcaacgccggcagcccaaaggatgatgcttgcgacgatgatcagaaaaatcagcgggatcatgataaaaagcaggattgaaccgaactttccagatctcttttctttatcggccatttcattcgctcctaatgcccctgaatcataaactgcttgattgaaatgtcgtccatttccctcatctctgcagctttgtcttcaagtgcgaacatattaaattgtttttcccgcattttttcaaatttctttacttcaatgtttttttcggtgagctgttcctgcttctcattcatttcatttcgtttcatgatgacaagcttttgataatgatagatggtgttctcaagattggaaacgaattgctgataatgtctcatttcctgaacgctcatcccgcatttcagctttgattctttgtctttttcgagcaattcttttttgctcatattttcatatagtttttcagccactgtctcaaattcagaaaccgattgtctgtattcagtcaatgtttggtctttttcattttcttttaattccagcagcttttgaaatctgaattggtatgccacgatgtttattcctcttttccagtcagactcgtcaatgccgcaatgctgtcttccaattgagcaggttcttccgttccttgttttaaaaattgaataagctgcggataaaactgaatcgcttcatcaatttctcttgatgatcctcttttgtaagctccgatattaatgagatcttcagagttttgataagttgacagaagatcgcggaatttgttggccgcctctttgtgcgctgtgtctgaaatattagacatgaccctgctgatgcttttcaggatgttcacggccgggaactgccctttgttggcaagcgcccgatcgagaacgatatgcccgtctaatattccgcgcaccgtatcggcaatcggttcgttcatgtcatctccgtctacgagaaccgtataaaaagcggttatcgttccttgttcattcgcgcccgttctttccagcaaacggggcaaaatagcgaacacagaaggtgtatatccttttgttgtcggcggttctcccgctgccaggccgatttcccgctgcgccatcgcgaccctcgtcacggagtccatcatgaacatcacattccggcctttatcgcggaagtactccgcaatggcggtggccgtatacgccgctttcaaacgcattaaggcaggctgatcagaggtcgcgactacgactatcgagcgtttcaggccttcttcgcctaaatccttctcgatgaattcacgcacctcgcgcccccgttccccgacgagtgcgataatgtttaaatcagcttcagtctgcttcgcgatcattcccatcagggtgctttttccgactccgcttccggcaaaaatcccgattctctgcccttttcctaccgtcagcagactgtcaatcgatcttacgccgacacccatcttttcccgtatcggcgggcgtttcatcgggtttggcggcggctgttccgtcgaaacgggggacaaacctttcgggagcgcccggccgtcaagaggttcgccgaacgcgtcgacaacttgtccgattaaacccgcgcctactttgatgcggagcgactcgccagtggcctccacaatgctgcccggcgcgatgctggccgcttccagataaggcattaacagaatgttttcatcttggaagcctacaacctcagctttaatcgcttttttcgcatggcctttcggataaatgagacaaacatctccgattgagctttcgggcccttttgattcaatcatcagcccgatgacccgtttaaccttgccgtagcgcttgtacggatccgctgtttcaattgagtctattaaatactgtgtcttcattgctccgctcccgcctcaagcgccgttaaaagcttttgctttaattgcatcagctgggtgtctatgcctgcatcaacacgtccgaacggagtttctatcgagcacgttcccttcgcggcttttgcatcggcatataagcttaatctgcattctttgtataacagctgctgaatttcgtccatatgctgatgaaccgtctcataatattcagggtccacatagatggagatgtcatcataatctttcacttcggctactacctgtttgaccagcagaaggaaagcctctttatcatcacttttttgccgccatacttttttagcgagcgcaacggaaagctcaatgatttcttcctcagcgctttccagtttttcctcgactgactgtctcgccatttccataacggcattggcccggctgatgagattggcgtattcagcttgagcctcggcttttcccaatgccatgccttcttcatatccttctgcctttgcttcttctatcaatctttgtttttcttccgcccagcggtttttcgcttcttcaatctgcagaagagtgtgctctaattgatttttcgcttcttcagacaccctgtcggcttcggccttggcaaaggccatgagagcctccggattttcgggttcctcccggtctggatgggaatgtgatttcctgacttcctgcaaggaaagcttgcgccgtttttgttcaggagaaaatgatgattgctgtttaatgatattagacaataatatcgtctcctccgcctcgcgcgattacaatttctccggcttcttccagcttgcggacgacgcccacgattcttgattgcgcctcttccacatcacgcaaacgcacaggccccataatttccatttcctctttaaacgtttcaaccatacgctgtgacatattgctgaagacgatttctttgacttcctcgctcgcaaccttcaatgaaagcaggaggtcgtcgttttcaacgtctctgatcacgcgctgaatcgcacggttatcaagggtgacaatatcttcaaagacaaacatccgttttttgatttcatccgccaactcaggatcttggatttccaatgaatcaaggatcgttttttccgttcctctgtctacgccgtttaacacttcaacaacggcttctatgccgccggtctgcgtataatcctgcgtaaaggaggaggacagcttttgttcaaggacccgctccacttcatttatgatttcaggagacgttctgtccataaccgcaatccttcttgccacctcagcctgaacgtccgggttcagctcagacaaaatctgtccggcctgcaccgggtcaaggtaggataaaatcagcgccatcgtttgcggatgttcctgctgaatgaaatttaaaatctgttcgggctccgcttttctcgcgaaatcaaacggctttacctgcaaagaagaggtgagcctgtttaaaatgcttaccgctttgtcttctccgagcgctttttcaagcacttggcgggcgtaatttaaaccgccttgtgaaatatagtcctgagcgattgcgatattatgaaattcttcaatgatttcatcttttctttgatgatcgacgcttctgactcccgaaatctcgagtgtcaatctttcaatttcttcttcagacaaatgcttgtacacagaagctgatacatcaaggcctaaggaaatcatgaggatggctgctttttgttttcctgtaagcttgttctgatcacgtttcgccattttccattccccctaatcctcgtccagccagcttcgaagcaatttagcaaagtcttccggtttttctttagccattttttcaagctgttttcgtctgactgtttcttccgtttcaattttctcttcgttgatatcaggcaatcgaaccggctcgggcggtgtttcatattcatattcttcgtattcatcctcttgtgagcgtttctttctgatgaggagaataataagcagaataatggccgcaagcagtacgccgcctgtaatgtatacccagatcggaagacctgaagattgtgccgaatctgtgttcaggcttgtttttccgtcaaacggctgaacggatacaacgattttattgttgatatcattgtctgtcaggttttgattttgcgtttcgtttttatcaagagacgttctgacgaccgttcctaaaatcttctgtatatcagcctgtctctgtgctgataaggaagcggcatttttcggattaggcggctccaccatgacctgaatgcctaaatcacgcactttatacgggctttcagcgatttctttatgaatgcggttgacttcatagttgattttattgctgcttttttcgtagtccccgctgtttgaaccgccgtttgtctcggcatagttcgcggtgtcattgcttcccgttccggccgtgccgccgttggccgcgccgtcgcctttatacgtttccgcaactttttcggcgcttaccgctatgccttccatgttatctttatcgacaggttcgacagtgtcttcagtgcgtttttccttcgtgaagtcaacatccgccgtcacggaaacaacgaccttatcctgccccatcattgtgccgagcagtgactgaacatgtttttgaatgtccttttcgacctgcgacttaataccttgctgagaagcataactgtcagaaacggaccctgcaccgctgtcacttttgtcataatatgtagaattttgatccattatgacgatattatcttcttttaagttcggaacacttttagaaacgaggtggtacagcccgttgatctggttttgatcaagcgagtagcccggtttcatctgcaaaacgattgatgcggacgctgccggctgatcttcaccgacgaacacggcttctttcggcatattgatcatgaccttcgagcttttaataccgtccatttcatttatcaggtttgacaattcggtctgagtcgcctcaacctttaaaacgtcaaactcattatccgtcaggccgaagcccgcattttgtccgaaaaacgaataatcaattgatcccgttttcggcaggccttccgcggcaagctggactttaagcgaatccacttggctctcaggaaccttaatgaccgtgccgccgtcagcaagttcagaagacacctttttcgtatcgagctcttctttaatcttccccgcttcttccgcggacaaatctttataaagaggcaccatcttttcagacgaagtaaaaataataacgacgatgagtaaaataatgaatgcggccaagccgcttaccatgagtatcttctgtgtttttgatctgttgttccaaaacgctgccgttttggttttcatttgcattagagtacgattcatgttaacccccggtcattccagtcattctctttaatctgaccactacatctgcattctcatgatttcctgataggcttccacggctttattgcggaattcggtagcggccgtcagagaaatatttgctttttgggcagcgatcatgacctcgtcaaggtttacatcctttcctgcagccagttcgttcgttatttggtcagattttacttgtgactcatttaacgaatcaatagagttttttaaaagctccgaaaagcttgtttggtttgaagaatcagttttttgagtttggtttaattgattcgttacgttttgagtgttttgggtttgttgaagctgaaaaggagtaatagcgttaaccacttacatcaccttactttccgatttctaacgccttcaaaagcatgcctttggaagcgtttaatgcagttacgtttgcttcgtatgatctcgagctgctgacaagatccaccatttcctttaatggatctacatttggtttttgtacatatccgtctttattcgcatcaggattctccggatcataaacgagattaaaagcggacgggtcttccgtaacaccagatacctttacgccacttcccgcgcttcctgttccgttcatcttggaatgtaaaagggacgaaaatgattcgcctccggattggagagataccagctttcttctgtaaggcacccattcgccatttacctgcttcgctctcgttgtatccatattggccaggttggacgatacgacgtccatccggacacgctgcgcagttaaagcggaacccgaaatatttaagctttgaaagccactcattattttcctcctgtcaagacggttttcagagaattgaatttgccgctcattctttcaaccaaagcctgataattaatttggttttcggctaaatctgtcatttctttgtcgatatcgacattgtttccgttttgctggtacgatgtatcactgctggacacgatagaataatcgtcccccgaacccgtaaagtcaacgtgccgatagtcggtttttacagcctcaagattggatgtttcctgatctaacaaatttcggaaagagactttttttgccttatagttcggtgtatctatattggcgatattattagttaagactttttgcttaatgtccgctctccccaaggcattctcaagattttgtatagttccagaaaataagtccaaatccacttacctccatttcagatatttttctcctaaaaatccttgtcgagaattgtaaaaccatatgcttattgtaagaaataacaggcttaaagtctatgaagttaggctaaaaaaaagtgctcaattatatctattttgcatgtaggtattaagtcctagaatatttgtactacaaggatttgtttaatataagactgaaaatagcccaatttctgtttcttcctccttttttcacacagcaagatggattatctcagatcagattccaataagcaactttaaactgcaacttttcacctattgtccataaaaaaagcagaacccccattttcagggatcctgcttttgtcttaatgagatttaaggttttccaattcaataaggaatttgttgttcagaactttaatgtacgtccccttcattcccagtgatctggattcaatgacgcctgcgctttccagctttctcagcgcgttaacgattactgaacgcgtaatgccgacacggtccgcaatcttacttgccacaagcaagccttcgtttccgtcaagctcttcaaagatatgctcaatcgcttcaagttcactgtaagacagagaactgatcgccatttgaacaaccgctttgcttcgcgcctcttcttcgatttcttccgctttttctcttaaaatctccattcctacaacggttgctccgtattcagcaagaatgagatcatcatcttcaaattgatcctgcagacgggacagaatgagcgtgcccagtctctctcctccgccgatgatcggcacgatcgttgttaagcccgcttggaacaggtctctgttttccacaggaaacgccgtgtattcgctgttgatatcaaggtttgaagacgtctccggaacattgaacagatttctcgtgtactcttccgggaactggcggtcttcaagcatttttttcatgcggtcattttcaatctgctgattaatagagtagcccaaaagctttcctctgcggctgacgacgaaaatattagaatcaatgacgtcacgaagcgtttcagccatttctttaaagtttacgggtttgcctgccgcagcctgcagcatgctgttaataattcgtgttttttgtagtaaagccatgataaataatcctcctagaattcctcttattaaattttcacaatataaattgacttagatctttgttgtttgcaatcgttccgagcttttcttcaacgtattgcggcgtgatggcgactttttccatcgtcacgtccggcgcttcaaacgacaggtcttccaagagacgttccaatatcgtgtgaagccttctcgctccgatgttgtccgtatcctgattcacatgataagccacttcggcgatcttacgaatagcttcgtcagaaaattcaagagatataccttctgtctgcaataaagcctgatattgttttaacagcgcgttatcgggttcgacgagaatcttcacaaaatcatctaccgtcagcttgctcaattctacacgaatcggaaagcggccctgcagctccggaatcagatcagacggtttggccatatggaatgccccggctgcgataaacagcacgtgatctgttttgacggagccgtatttcgtgacgacggtagatccttcgacaatcggaaggatatctctttgaacgccttctctcgatacatctgctgaggaagaagcccctccgttttttgcgattttatctatttcgtcaataaagataatgccgccctcttcagctcttaacacggcctcttggccgacttcatccatatcgattaatttgcctgcctcttcattggtcagaaccttccttgcttctctgaccgtcattttgcggcgttttttcttttttggcaccagattgctcagcgcatcctgcatattcatgcccatctgctccatcccggagccttgcagcatgtcaaacatcgacggctgctgctcttccacctctacggagacgtaatggtcttcgagctctcccaatgcgagctgatgcgccatgcgctttcttttctcttcaaggcttgcttcttcctgctggtcggcttcatcatcatttgccgcctggtttcctccgaaaagcatttcaaacggatttttcacacccgcttgttttttctttcccggaacgagaagccgcactatacgtttgtttgcattttcttcagcctgttctttcacttcgctgattttttcttctttaatgagccgcacggatgtctcaacgaggtctctgaccattgattcgacatctctgcctacatagccgacttctgtaaattttgtcgcttcaatttttataaatggcgcaccggtaagcttggcgatccgtctggcgatctctgttttccccaccccggtcgggcccatcatcaggatgtttttgggaacgatctcgtctctcagtttttcatcaagaagacttctgcgatagcggtttcttaatgccacggcgacagcttttttcgcatcctgctgtcctacaatgtattgatccaaccgatctacgatttgtctcggtgttaacggtttgttttccatgcgcctcaagtcctttctattcaagttcttccaaaatgatctgatcgtttgtgtacacacaaatctcgcccgcgattttcaaagcggcttttgcaatatctttggcggacagattctctccggcataggttttcagcgctcttcctgctgacagagcgtagtttccgccggagccgattgccaaaatgccgtcatccggctcaatcacttcacctgttcccgatacgagaagcaaggtatcctggttcatgacaatcagcatggcttccagcttgcgcagcactttatcgctgcgccattctttcgcaagctcaaccgacgcacgttttaaattgccgttgtattcttcaagcttcgcctcaaacatttcaaaaagtgtgaaagcgtctgcaacagatcccgcaaatccggccagaacctttccgttaaacagctttctcacttttctcgcggtatgtttcatgactacagcctgaccgaatgtgacctggccgtctcctgacatagcgcttttcccgttatgctggacggcaaaaatcgttgtcgcatgaaaagatgacatgagaagggcctccttttaattttctttaaaagctctcgggtggtgggacatatatgtgtttctcagcatttccttcgatacatgtgtgtatatctgcgtagaagacagattggaatggcccaaaagctcctggacgcttcttaaatcagccccttcattcagcagatgagtcgcaaacgtgtgccgaagcatatgcgggtgtatatgtaaagtgccggatgctttttttacaagcccgcttaaaatataccggattcctctggcggtcagcgggccgcctctttgattgacaaacagcacatcatgaggctcttttgctttttcaagcaggcactgccttccgctgttgatatacagctccagcgcatcacgggcatatgagccgaacgggatatagcgctgcttcttgcctttcccgtgaacgagcaccgtatccatgaacaggtcaagatcgccgacagtgagcgtacagcactcactgaccctcattccggtcgcataaagaagctcaagcagggcctgatcgcgcatccctgacggctgacttctgtctgaaacagcgaatagttcctcaagttctttttcataaagaaacttcggaatccgtttctcttgtttcggcagatgaacaagctgaaacggattctcttcaacaagcttttccctcattaaaaatttatagaagcttctcaaagctgaaattttcttgctgattgtttttcttgacaggcctttttcataagcctctgtcaaaaatattctcacatcatgatatgcagcttctttcattccatttatattttgagcatgcagaaacatcccaaattcttcaatcgaattaacataattcacaatagtatattgtgaataatttttttcaatttgtaaatattcaacgaataactttaaaaaaaagttaacattctcagtcattatgaagacctccctctccgaagggcttttaaatggtatcatataatgcatcgaagttgcaatgaaaagctatatcgttttcgaaatagtttgaatagtctcaattgcgcgtttagcgtattcttcatttcgttcttttttgtttttaattcttacaggcaattcttttaagaggccgaagtttgcattcatcggctggaagttcttctgatttgtcgtcgtaatgtagtgagccatgcttccgatcgccgtctcctgcgggaatgtcacaagatcctgaccgagcacaagtttggcggcattgattcccgctacaagacctgaagcggcagattcaacataaccctctacgccggtcatttggcccgcgaaaaacagatcgttccgctgtttaaattgatatgtcgggttcaaaaggctcggcgagttgataaatgtgtttctgtgcatgacgccgtatctgacgatatcaacattttcaaggccggggatcagtttaagcacttctttttggtctccccattttaaatgtgtctgaaaacctacaatattataaagcgttcccgccgcgtcatcctgtctgagctgaacgactgcataagggcgcttgcctgttttcggatcttccagtccgaccggtttcatcggtccgaacagcatcgttttcttgccccttttcgccatgacttcaatcggcatgcagccttcaaagaagatttctttctcgaattcttttaaaggtaccgtctcagccgtcgtcaatgcttcatagaaacggtcgaattcttcctctgtcatcgggcagtttaagtacgccgcttctcccttgtcataacgggattttaagtacactttctccatatcgaggctgtctttttcgacaatcggcgccgccgcgtcataaaaatacaggtactcttctccggtgagctctttcagctgctgtgaaagcgattctgacgtaagcggtccggtcgcgataacagtcggaccttccggaatctctgttacttcctcagtaagaaccgttacgttcggatggtttttcacgagatccgtcacgctttgcgcaaattcatgacggtcaacagcaagcgctcccccggccggaaccgagcatttatcagcagattgaatgattgccgagtcaagcgcccgcatttcttcttttaatacgcctaccgcattggcgagtgtatttgaacggagggagttgctgcataccagttcggcgaatttatcagtatgatgggctgccgtctgcctgacgggccgcatttcgtatagttttacttgaattcctcgttttgcaagctgccatgccgcttcacttccggcaaggcctgctccgattacattaactgtttgctggttcatttcttttcatctcctgttgtttgtcccttccacacaaagaaggtgagcaaggcactgctcaccgctacttctgtggttcttccttataatcgcattcgacgcattggacttgtatgccttttttaagctttttctctacgagcatattttcacatttcgggcattttcgttcaatcggtttgtcccaagatacgaagtcgcattcaggataacggtcacagccgtaaaagatgcgtttcttttttgattttcgttcgacaatgtttccttcatggcacttagggcattttacgccgatttgtttgacaatcggttttgtattccggcagtcagggaaattggagcacgccataaatttaccgtatcggcccattttataaaccatccgggagccgcataactcacaatcttcatcggcgtattcaggttcaatttccacttctttcatttcggcttccgcttttttcacgcgtttttcgaaatcagtatagaagctgtcaatgatttgaacccattctgtctggccatcttcaacatggtcaagatctctttccattttagccgtgaattcaacgttaatgatttccgggaaaaactccatgataagatccagcacgatctgcccaagctcagtcggcacaaaccgtttattgtctaatcccacgtaaccgcggcgctggatggtgtcaagagtcggcgcatatgtcgaaggacggccgatccccagttcttcaagcgttttaaccaggcgcgcctctgtataacgcggaggcggctgagtaaagtgctgctcaggctcaatatctttcgataaaaccgtgtctccctctttaaggtccggaagcatgcggtctttttcttccagctgatcgtctttaccctctacatagactttcatgaagccggcgaatttgactttacttccgtttgcccggaatgtcaatccgttattgctgagatcgacgctcatcgtatcaaggacggcaggcgccatctgacttgcaacaaagcgctcccaaatcagcttgtataatctgagctggtctcttccaagcaccgcttttaagtcggcaggttttctgagcaccgaagtcgggcggatcgcttcgtgagcatcttgtgcgttttcatttttctttgccggtttccgttttcccgctaagtactctttgccgtacgcctgatcaataaaagctgacgcttcttcaacggctgtattggaaatccgcgttgagtccgttctcatatacgtgatgagcccgactgtcccttctttgccgagatcaattccttcatataattgctgcgcaatcatcatcgttttcttcgctctgaaattcagctttcttgcagcctcctgctgcagagtggacgttgtaaacggcagagcgggatttcgtttgcgctcttttttcgtaaccttgtcaactgtatacttattgcctttcagctgagcaaggatggcttttacgtcttcttcgctttttaaaggaagctttttgccgtttttcccgaaaaatccggcttcaaacgtctcttttccctttaaaaatgagccggtaatcgtccagtactcttcaggtttaaagtcattgatttccttttcccggtcgatgatcagccggagcgcaacggattgcacacggcccgcactgaggcctttttttacttttttccaaagaatcgggctgattttgtatccgacgagtctgtctagtatgcggcgcgcctgctgcgcatcgacaagatccatattaatcatgcgcggatgtttaaatgattctttaatggcgtctttcgttatttcattaaagacgacccggcagtccgagctgagatccagatcaagactgtgtgcgaggtgccatgcaatcgcttccccttctctgtcggggtcggccgcgagatagactttttttgctttctttgccgctgtttttaattcttttaaaacagggccttttccgcggatcgtaatatatttcggttcaaagttctgttcgatgtcaactcccatttgacttttcggaagatcccggacatgtcccattgaagctttgactttatatttcttccctaaataacgttcaatcgttttcgcctttgccggcgattccacgatgactagataatcagacattttcatccccctcaagaggtgttctctctcttttcaagtatcaattcattttagagctgcctttttatggctttcaacatttcattctttatgatgaacgtcattttatacatgaaaataatgtgcaactttaaatcctcactattattaaatattacaataccgtttgtcaaacgatatttcaaaagggttccgtatactgaacgcatcgggcggtcagctctccgtcaatatcctctgcgcataatacagctttcgccccttcttgaatgagttttataggtcctccggaatatggattaaatatggaacccggaacggcaaatacctctctgccttgatcgagagcctggtaagctgtgattaatgaaccgcttttttcttttccctgcacgaccacaattccttcacttagtccgctgattatgcggtttctcatcggaaagtgccattttttcggctttgtttcaggaggatgttctgagagtaggagatggtgttcagccatgtattctgctaacaggagattttcccggggatagatgtgatggaatccgccggctatcacgccgatcgtaagcccttttgccctgatgctcgccttatgagacaatccgtctataccggatgcaagcccgcttacaatgacccagcctttttttgagagttcggcggaaagatgcccaaccgcttttattccgtcttccgtcggtttccgcgttcctacaatcccgatttttctgcctttttcaagaagcagcgtgttcccttttgcatacaagacagccggcggatcataaatcgctttaagccatgttggatagcggcttgatgaaatcggaatgacagtaatgccttcgcggcggtaatcggacagaacttcatcaagtttcggatccttgcgctctatttcccgaaaaattgcttcccgggctgttttcccttctgataaaacagttaatggatgcggatccggtaaaaaagacagagaatgatcagctttccaccattttaatagaagagacggggaaatgatttgattaatactgcagaccattaaacagcgcgatgcttgatccaaatctggaaacctcctctttttttcagcaaaaacaggaacagccgttacggctgcccctgcttcgatcagtgcgttttgcacgtttcaaataagcctttttcttttaacaccttaatcagcgtttcacccattacagaaggggtttccgcgacttcaattccgcaggcgttcatcgttttgactttttcttctgccgtgccttttcctccggagatgatggcgcccgcatggcccatgcgttttcccggaggcgcggttttaccgccgataaagccgacaacaggcttcgtcatgttcgctttcacccactcagccgcttcttcttcagctgtgccgccgatttctccgatcatgatgacggcatgtgtttcaggatcttcattgaacgcttttaacacgtcaataaagttcgtgccgttgaccggatcgccgccgatccctacagcggtagattggcctacgccggcttctgaaagctgatgaacggcctcgtatgtcaatgttcctgaacgggacacaacgcctacatgaccctttttatgaatgtatcccggcataatgccgatcttgcattcttcaggtgtaataacaccagggcagttcggccctattaatctcgttttcttgccttccataaaacgcttcactttcaccatgtccaaaaccggaatgtgctcagtgatacaaatgacaagatcaatttccgcgtcaaccgcttccataattgcgtccgccgcaaacggagccggcacgtaaataactgacgcatctgcgcccgttgtatgaaccgcttctgcgaccgtattgaataccggtacgccttccgcttccgttccgccttttccaggtgttacaccgccaacgatattcgtgccgtattccagcatctgctttgtatgaaataaagcggtagaacctgtaatcccctgtacaataactcttgtatctttattgataaaaacactcattatctggtcccctgcctttcattctttcctaaactaaggatacgattttctgtgcgccgtctgccattgattccgcagatgtgatgtttaagcctgattcattcaggattttctttcctaaatctacgtttgtcccttcaaggcgcacgaccagcggcaatgtcaatccgacttgtctcgtcgcttcaacaacgccctcggcgatgacatcgcacttcatgatgcctccgaaaatattgacgaaaattccttttacgttttgatcggaaagaatgattttaaaagcttccgtcactttttctgcggttgcgccgcccccgacatcaaggaagtttgcaggttctccgccgtagtgtttaatgatatccatagtagacattgcaagacccgcgccgtttaccatacagccgatatttccatcaagggaaatgtagcttaaatcgtattttgacgcttcgatttctttcggatcttcttcatctaaatctctgtattccataatgtctttttgtctgtataacgcattgctgtcgaagttcagcttagcatccagcgccatgacgtttccgtcccccgtaacgacgagaggattgatctcggcgatggagcagtccttctcaacaaatgctttatataaaccgagcataaatttagcggctttgccgacaagctctttcgggatgttaattgcgaatgcaatttcccttgcctgatagccctgaaggccgacagccggatcaattaccgcttttttaattttttcaggtgttttttccgctacttcttcaatctccgttccgccttcttcagacgccattaaaacgattcttgaagtagcgcggtcaagtacaagcccgacatagtattcctttttaatatcgcagccttcttcaataagtaagcgttttattacttgtccgtccggacccgtttgatgtgtgacgagcgtcttgcctaacagttcttcggcatactctttcacttcatcttttgtttttgcaatctttaccccaccagctttgccgcggccgccagcatggatttgcgcctttacgacataaaccgagcttgacaggctctctgctttttcaactgcttcctctgctgtaaaagccactttaccttcaggaacagacaccccgtattttctgaggacttcttttccctggtactcatggatattcatttcccatcctcctaacttatgtagcaaaactaaaaatagactgcgctttcattctatataatactggaagaattgtctagggttcaaaacaaaatctttatatccttccaaacattctaacttttattttattgaaaatataaatttaaacggagtccgggaaatgaatggtccttatttttcgtttttcagggtttcgtccagtctgtaaacaaatgaaaaaatttcggcaacggtttcatagagcgcctccggtatctgatcgtcaaccgtcaaatggcgcattaattcgacaagggttctgtcttcctgaatggggaccccagctttctcagcttcttttataatattttccgccacgtgccccctgcctgttgcgacaaccttcggggcttggtctttctgccggtcgtaatgcagggcgacagctcttcttaacggcgtttgctctttcatattttcacatccacttttcttccgccgtctttttctataaactcttccacaagagcgctctggtctttcgggcgccgttttttagccgtgacgcctgacaggctatagcccgtttcttttacggcttcttttaaagccggtacgagagggtcgatggccgcctgaagctcaaaatcagtctcaaccgtaatggtcattacattttgctgaatcatgcagtccacaagggtttcttgcagtgtttcaaggtgcagcaaaaacaggagcctgcaatgtgacggatcgagttttccgtccggcttcttccgtcctttaaagagaactgtgatgtcattctcatacgcggacgctcccagcggaaatgacagcaccatctgcgtaacagaaggattatgctgctcaataaacagctggccgtttaatttatgaataagcggttccgcctcttgtttaacggattggggcgcctcttgaagcgtccggacggcttggagggctgttttcagtgcttgtttctccggctgcggagatacgcctttttcaagcgctgtaatgaatgataattcatcacgcgtgcccagtccttttttgattttctgcaaaaggcttaatacatcatgtttttctgcatatttcaattcggtgagctgagcggctttttcgaaaacagccgcctcctgttctgtcagatgtgcgttttgaagaacaggtgctgttttcaatgttttttcttgagaaatgaaagccttaatgatctccgccgttacttttacgggacggttttcagttttttctgccgatgtcattaatttctctataatctgttttgccgttttttcaggaagttccggatttgcccttgcactcggaggagaaggctggcttgagactgcctttccgttttcacgagtctctcggacaaatggtgattgttttgattccgtccgttctccttcatccatcagcccggtttctgagagcggcatgcgtgcagcctcggcaagcttcttcaggagacgttctgcatgaagatccgtttctgcgtttaacacgtcagaaaccgcctctttgagcacagacagctcttttgccgattgcggagcctgattgattgcctgaagcagtcctgagaggaggcgccgggtcggaaccggatatttaacggcatgaatggctgacaagacttccggatgtgcgggcagttcccgtttcagcgcaaatacgattgtttccgccgcttttttcaattcggcggccggaagcgattcagcccagcggatgcaagctttgaggctgttttccgtcatcggcagcttctgctgcataaacgtttcggcaatctgcagagacacagggcccggtttgacagaaagagcgtttaacagtcttcccgccgcttcctgaacggttttcgggcttccttcgaattggtcaatgacatgaagccggcccgttttttccgccggctgtttgtcataagaaaaccagtaatacgcctgcggacgaagggcggtttcaagttttccctgcatcgtccggccgccgatttggataagagcgctttgatcgtccagcaaacggagaaccttccctaacagcagcctttgagagccgctgtctttaccgccgtcttgccggtccggagggatttccgccgtcagctgtctgaaagccgcttggatttcgccgcttatgttcatgtcttaagcctcttttctaacaataagattgaacgggagcgaacgtttttcggtgaatagttgtcggtccgtatgcctgaagagcttcaagatgttctttcgttccgtagcctttatttttttcaaagccgtacatggggtaggttttggcgtactcagccatgagacggtcccgcgttacttttgcgatgcaggctccggcggcaattgacacgcttttggcatccccttttataactgatgactgcggaatgtcaaggggaagggtcatggcatcaacaagcagataatcaggtgtttccgttaaagcattgacggcttttaccatcgccagtctcgcggcctcataaatgttgatccggtcaatgacgtccgcatggacaatgccgactcctactgccgccgcttcttccgtgatccggctgtaatattcctcgagcttcttttccgacaatttcttcgagtccgtgagaccgagaatctcgcattctgccggcaaaatgacggcgccggcgacaaccggtccggcaagcggccctcttccggcttcgtcaacacccgcaatcaggcggaagccctttttggatgacagtctttcgtatgccgtcatgttcagccattgctctttaagagctttttccttcgcgtgctttttcagccattgctctaaaagcgtctgtacgctttttctcgggtctttctcacattgggcaaggaaggggtcgctttcgtccctgacctcttgcaggcgttcttttacgctttttacggttaatgtattcacgttctcttctcccttacattatgtatatcggtattctgcggaaaaaataaagacccgcatcgctgcgcgtctttattctgatggtgtttcaaatgaaagcctgccgaatttttccgtccggatgtcccgaatgatgacttccgttgttttatcatagtcaaccattccgccgcccatcaaacagccgcgtttttcaccgatcgcgtcgaaaagagcggcgatatcctcagggatttcctgaagtccgtagcgctccttcaagcggtcgggataatgctcttccagaaagcgcagcccgaagacggccacatcctgcaggttgataatcgtatctttaatcgccccggtgatcgccagacgcaagccgacaagctcatcttcaaatttaggccataaaattcccggtgtatcgagcagctctaattccttgcctacctttacccactgctgtgaagtggtaatgccgggcctgtctcccgtcttggcaatgttttttttggccagccggttaatgagcgtagacttgccgacattcggaatgccgatgattaatgcgcggattgctcttggcctaacaccttttgctttcattttatcgaacttatctttcagcagctcttttgaggacggcacgatttgatgcagtccctgcccgttaacggagtttattgaaagagagggaatgccctgttcctgaaagtggtccttccactgtgcagtcacagccgcatccgccttatcggctttatttaaaagcataatgcgcggcttattttttaaaatctcctcaatcatcggatttctcgatgacatcgggattctcgcatccaccaattcgtatacgatatcaattaatttcagtttttctgttacttcccgtctcgctttagccatatggcccgggaaccattgaatggtcatgtgacttcgacacctgccttatttaccggaaccggatgttccgatgatctcttatgtattttacgttgcttgttccgcttttacaaatttcatataaaaaaagagcctgttacgggtaacaagctcttttcgttcgttatcattatcgtctgatttctttaatacgagccgcttttccgcgaagttcacgcaggtagtaaagcttagcgcgacgtactttaccgtaacgtacaacttcgattttcgcgatttttggtgtgtgtacagggaatgtacgttcaacgccaacaccgtaagaaatcttacgaactgtgaacgtttcgctgattccaccaccacgacgcttgatcacaacaccttcgaagatctggatacgctcacggttaccctcaacaacttttacgtgtacacgtaaagtgtcaccaggacggaacgcaggaagatcagtgcgaagctgttcttttgtgatatcttgaattagtttttgcatcgttttcaactccttccaacagatgctcttggccacaactgcaaggcacagcggaacatcgttttcaagcttctgaaggataagcctccttaagccacaagtagtatcttatcatatcttcatcgcctgcgcaatagaatctattcgttttcccactcggaaatccattttctttgctcatcagtgagaggatagtttttaagaagatccggacgtcttaaaaaggttcttctgattgattctttattgcgccattcttgtattttggcatggttgcccgacaaaagggtctcaggcacttttaagcctctataatctgcaggcctcgtatagtgcggatgctctaaaagccccgtgctgaaggaatcctccacgtgggatgcttcttttccgaggacgcccggcaaaagcctgacaacgctgtcggcgatcatcatggcagggagctctcccccggtcagcacaaaatccccgatggagatttcatcagtgacaagatgttcccggatccgttcatcatacccttcataatgtccgcaaataaacatgagatgttcctcttgtgccagctcctcggctttcttctgcgtataacgctcaccttgcgggcagacgagaataatgcgcggcttggcgtccgtaccggctgtcagcttttcaaccgcatcaaatacaggctgcggctttaacaccatcccggctcccccgccgtacgggtaatcatcaaccgtttggtgtttattatccgaaaaagcccggaaattgatgacgtcaaaacggacagcctctttttcctgtgctttttgcagaatggaggagccgagcaccccttgaaacatttcgggaaacagtgttaaaaagtcgattttcattcgtctattaacccttccattacatgaatcttaattttcttctcatttatattaatatcctttaccacagaagcaatatacggaatgagcgcatcttttttgccttttcttgcaaccacccatacgtcattagccccgggcgtcaagatttccttcactgtgccgatcagttccccgtcttctgacacaacctcgcagccgatgatttcatgaaaataaaattcatcttcttcaagctctcccaagtcttcttcagggactttgatcaccatgtttcttaggtgttcgacttcattgagactcggcatttctttgaattgcagcaggtgaaactgcttgtgaagcctgtgggcgcttaccgttactttgattggctccgcagccccttccgcaaacaaatagagcgtattgccgggcttgtaccgttcttcggcaaagtccgttttagaaatgacccgcacttcgcctttaatgccgtgggtatttacaattttgcctacattaaaccatctgtttgtcatattatcacctcgggcggatttcaattactaccccgtcttttatgacgatggtatttgccgctgttttttcatgccagttatcaccgacattgattgaaagcagcgcatcgatctccttttccttcacttcgcttccaagcgggagcgactctgtctggcttatttggaaatcgatcattttgattttgtcttgtcttttctcaatggcttttttaaaagattccgctacatcgggattctgctgatctttttcatgttttctaagctgaaaatagagctggctgcattctcgttcaagcgtttgctttttttctgcaaaagaggccaaaagctcttccttgctttgctcggtcagaacctgcataacggttaccctgtgaataatctgcataggaccagactccccactcttccaacatatttctgttcatttgccttttttacgtgtaaaaaaaggggaggtgccggccctctccctttttcagtcaaatatttcaaattgaactttcttagaagactgtgcgccagctgcaaaaacgacggttcgaatcgctcttgcagtccggccttgctttccgataatcttaccggtatctgacttattgacagataagcgcagcgcaatcttttgatcagtctcttcctttgtgaccgttatgtcttccggatggtcgacaagcggagccacaatgctgacaatcaaatcttccaagttctgatcagtcattacttgccttgtttagcgttgtggaatttttccataattccttggcttgagaacaagttgcggactgtatcagaaggtttagctcctgtttgaagccatttaagagcaagctcttcgttgattttcacttcagccggctttgcaaccgggttgtatgtgccgactgtttcgatgaaacggccgtcacgcggtgaacgagaatctgctacaacaatacgatagaaaggagatttttttgctcccatacgttttaaacgaatttttactgccattttactagcacctccgaaaatatttcaacaagatagtatattaacaatgataaaagtgtttgtaaagtgttttttcttaacaacggttttatcatgtataaccgattacataaaaggtaatttaaagccttttttcttcccttttgacatgttggtcatctgcttcatcatttttttcatttcctcaaactgctttaaaagacggttgacttcctgaacggatgttccgcttcctttggcaatccgcttccgccggctggcgttaataatatccggctgttctttttcaagaacagtcattgatttaatgatcgcttccacatgattcagctgtttttcatcgacttggatgttttttaagcctttcattttgcctgcgccgggcatcatttgcagcagttcgtcaagaggacccatgtttcggacctggccgagctgctccagaaaatcatccaatgtgaagctcatcgttctcattttctgctcaagctctttggctttgtcttcatcaacggtcgcctgagctttttcaatcaaggtcagcacgtcacccattccgagaatccgggatgccatccgttcaggatggaacgcttcaagagcatcgagcttttctcccattccggcgaatttaatcggcgtttcggtgaccgcgcggatagaaagcgccgcacctccgcgggtatccccgtcaagctttgttaaaatgacgcccgttaaaccgagctggtcattaaagcttttggcgacgtttaccgcatcctgaccggtcattgagtcgacgacaaggaaaatttcctcaggatttgcgacttcctttacgccggagagctcatccatcagttcatgatcgatgtgcagccgtccggcggtatctaaaatcacataatcatgatgctcttccttcgctttttcaatcgcctgtctggcgatttccaccgggctgacctgatcgccaagcgaaaagaccggcatatcaagctgtttccccagtgtttccagctgtttaatcgcggcgggtcggtaaatatccgcagccacgagcaacggtttgcggttatgttttttgcgcagcaggttggcaagcttccccgtggttgtcgttttaccggcaccttggagcccgaccatcataataacggtcggcgggcgtttggcgacggcaattttgctttcttcgccgcccatcagctcggtaagctcttcttttacgactttaataacctgctgaccgggtgtcagactctgcataacgtcctgtccgacagcccgttcacttacttttttcacaaaatcctttacgactttaaagttaacgtcagcctcaagaagcgcaagacgaacttcacgcatcatctcttttacgtcttgttcgctgacttttccttttccgcggatttttgaaatcgtcttttgcagtcggtcggctaatccttcaaatgccattgtttgccgcctcctaatctaatttctcaagcgcttcaatcagagccgtcattttttcctcttcctgcaacccggaagcaagctctttcagctttgtaaacatttctttacgctcctgaaactttttaaaaaggagcagtttttcttcatattgttcaagcatcgcttcagtccgtttgatgttatcgtaaacggcttgccttgaaacgtcatactcttcggctatttcaccaagggagaaatcgtccagataataaagcgacatatagctcttttgttttgacgtcagcaacgactgatagaagtcaaataaatagttcattctcgtcgttttttcgagcgacatttgagctctcccctttgttaagtcaaatccctttacaaaaacttagtttacatggtttcagagcgtgtgtcaagtttttatcttgtcaaagcaggatgctctttttacataataagtttttttaaaaaaattcatacagaccgtcgttaaaatactcgaattcttgttttgatacacgatagcggcaatagccttcgtaaaaagcattgaggcatgcttcatttgtgacaaaatgactgatcgctaatgattcatcatatcgcggatctcccgccgatattcccgcagcatcgataaacagatagacctctccgtctttcaccagcacattatcagtcgtgcagtcaccgtgaatcattgtctgctgaacaggaacaggcctgtacctgtccaattccttcaaaagctctgcacttccttcagcctgtccttttttgacatattccccggctcgtttgatttgcagatcgagccagtctgattccggctgtaaaccagggaccatttcggtttcatgcagacgttgcagaaaccggccgaaacttttgatcagctttttcttttcagtatccccttttgcttttcttaaagccgaagtcagggtgattccatcctcaaatgacatgatgatatggctggcatgctgttcctgtatcatcccataataaataggaacaggcagacgacgagtttccgtcagtttttgtaaaacgaaggcttctctcattaaccattcccgatacttctgttgaaaagaacttttcagcagaaatgcgtcttggccggtcactatttttcgaacggttgaagtgcctccctgttcatccaacagcgacatatggtttatcgcgccgatcttactttccaattcagctttcagccatttgtccaacaattgccccctccattccgatctatcaatgcgtataaaaaaacgagtataaaaccgtccattttatactcgttttttattcattaatcctcggctttttcaactaaatcagaaaagagaccgtatacgtaagattctgcatcaaaccgctggagatcgtcaaccttttctccgaggccgaccagtttcacggggatgtgaagctcattgcggatcgccaggacgataccgccttttgcggtgccgtcaagcttcgttaacgcgatacccgtcacattcgtcgctttggagaattctttcgcctgcgccatcgcattttggcctgtcgtcgcgtccagcgcaaggagaacctcatgcggagcctcaggcacttcgcgttcgatgacgcgtttgactttttcaagctctttcattaagtttactttattctgaaggcggccggccgtatcacaaatcagcacatccgctcctcttgctttagccgcgtgtacggcatcataaataaccgcagcagggtcgcttccggcagcctgtttaatgacaggcacgcctgtacgctccccccacacttcaagctgttcaatcgccccggctctgaaggtgtctccggcagcgagcacaacggatttgccttcattcttcagcttatgggcaagttttccgatcgttgtcgtttttccgacgccgtttaccccgacaagcagaataacgttcaggcgcccatcctgaatatttaattcagaaatctgttcgtcgccgctgttataaatgtcgacaagcttttcagaaatgacggactgcacttcctgaggatcctggatgtttttcagcttcacttcttttttgagctcatcaatcagctccataacggttgtaaaacctacgtcagcgccaatcagcacttcctcaagctcctcgaagaaatcctcgtcgactttccggtagcgggagacgagttcgttcactttatttgagaaggaatttcttgttttttcaagaccatctttaaatttttcagagacggagtctgtctgtttcgtgattttctcttttaattttttaaaaaagctcatctttcaacctctttcctcgttactgaacgaattcttttgtttcttccagtttgaccgaaaccattcgggaaacgccggattcctgcatcgtaacaccgtagaggacatccgcttcttccatggtgccttttctgtgggtgatgacgataaactggctgtcgccgctgtatttttttaaatattgcgcaaacctgaatacattggcttcatcaagcgcagcttccacttcatcaaggacgcagaacggcacgggccttactttcagaatggagaataaaagggcaatggcagtcagcgcccgttctccccctgacaaaagatttaagttttgcagttttttgcccggaggctgcgcgataatgtccaccccggaattaagaagatcattcggatcagtcagcttcagttcagcccgtcctcctccgaataaagaacggaacacgtcgttgaattgagaacggatctggataaacgtttcatggaatcgcttcgtcatttcagaatccatttcttcaatgacttgaaacagtgtgtttttcgcttccgtcaggtcatttttctgctctgttaaaaactgataccgttcgtttactctttcaaattcatcgatgctgccgagattgaccgttccgagctcttcaattgaaagcttgatcagtttgacccgttttctcgcctcttcaggctcgagttcgagctgatattgttcttttgctccttcaaaggataagctgtactcctcgcgtaaatactgcaagagattatcaagctcaacttccatccggccgagttttacctcttcatctttcagaatgtctgttttttgcttatacagacgcttcatctctttcagttcaagctcgttcgtatcaagagcccgctggagcttcacacgctggtcgcgccggctggcgatcaattcgatcgttctcgttttatcgtgaagcttgtgatgggctgcttcttcaagctgctcctcaccgcttgtgctggacgtcatctctgaggtcaggaggcttaaatcttcccgtgtttctttcagagcgagctgcgtttcttcaagctcttttttcagccgtttgaggttgtcttcttcactcgaacaagcctgttcttttttcgcagcagccactttacattccgtcagttcatgagagagcgtttcttttgttgaggatagggtctgcttttgttttgtcagcctttccatctcttcctcaagctctttcagctggccggatgcctcactcagctgttcttccagagctgatttgcgcgtctctttttcccggctgctttccgtcagtgatgctttctcctgatcgtaaagctccagatgggtattgatgttcttttcagcgacttcgagttcatacagcctgccttttacatcctgctgctttgttctgtaagattcaccgtcttcacggagaccgctcagcgtatgttcaagctcttgaatggcctgcttaagcgttttgacctctttttcgagcagagctgttttttcttccatttcggcaagccgcgcagtcaccgtctcaagctcacgacttctgccgagcagagaattgtttttctttttgaccgcgccgcctgtcattgatccgcctggattgacgacatcaccctcaagcgtcacgatgcggtagcggtgcccgagaagcttggccagttcattcgcgccttttaaatcttcagtgatcagcacggtgccgagaaggttttgaatgacattccgatacgcggcatcatatgtgacaagcccgctcgctgtgccgaggaaagacggatgcttctgagccgtctgttcatcacgggtttggagctggcgcggtttcataaccgtaagcggcaggaacgtcgcgcggccgaaggaattctgttttaaatattgaatcgctttccgcgccgcctgctcatcgtctgtgacaacgtgctgcgccgctgcgccgagtgcaatctcgatcgccgtttcatatttttgttcggtggcaatcagttcgagaacggcgccgcggatgccgccgagctgctctttctgcttcagcacttcttttacgccttggtaaaatcctgaaaaatcgccttgcatcgtttcaagcatatcttttttggatctggcctgctggacgaattgatatgcctgatacagcgctgattctttcttttcatattggcgttttttctgttcatatgctgtctggacttcgcgaaagcggacgacctgattgtgaatatcctcttcaacggcagccaattcttcttcgcacgccgctttgcggactgcaatatcgttacgttcttcaagatatttttcattgtttgctgtcagtctcgcctgctggaccgcggattgggacatctggtcatctaaaagctgcagctcgttgcgaatcgacgcctggctgtttaacaattcaaagtaatcgctttttaattgttcaattttctcatctacattttcattatgcagactgagagcctgctgcttttctttcacttgggcgtttaaccgcttcacttccgcacgaagtttatcatagacggcagactgttttgcaatgtccgctttcagttcggcttctttgttcgtgtaatgtgtaacggattcctcaagctgttcccggttttgcgcggcgttttttttacgctctttcagcacttctttccggccttccagcttttccagctcttcacttgtcacgagcagaacctgctgcagctcgttgacggattcatcaagcgcgtggattttatctctcgtctcttctatcatcgcttcttttgcggatagagccgatgattccgccaattcttcttctttagcagcctgcaccttgtcttttaaacccgaccatctgccatgcagttgttcgatgtcaaaggcggtaagggcaatttcgacatgctcaagctctttctttttttctaagtagtctttggcgattgatgcttggattttcagcggttcgacctgatcttcaagctcgtggagaatatcttccaccctgtttaagttatcctgcgtctcaaacagtttgttttccgcttttttctttcttgttttatatttcagcacgccggccgcttcttcaaaaatactgcggcggtcttccgctttgctgctgagaatctcttcgactttcccctggctgataatagagaatgcttcttttccgagcccggagtccataaataagtcaatgatgtctttcaaacggcactgctgattgttgatgagaaattcactctctccggagcggtacacccgtctcgtcacgctgacttcgtggtaatcgatcgggagaaaatgatcttcattatcaagcgttaacgtgacttcggcaaggttcagccgcttgcgcgaatcacttcccgcaaaaatgatatcttccatttttccgccccgaagcgagcgggctgattgttcgccgagcacccagcggatggcttcggtaatgttgctctttccgctgccgttcggaccgacaacggccgtgacgccttttacaaagtcaacggatatccgttctgcaaatgatttaaatcctataacgtctaaacgtttgaggaacatcccagatcctccttatcgtataagtatctcaatattatcataatcacccgcttatatcaggcgcagacatactgaaatccccctagggatacagggggattttattgtttcgtatgatgtttttgcaattttgcaagagcttcctgtgccgcatgctgctcggcttcttttttggaacgtccgttcccgataccgagcgcctcacctttaagagagactagcgcctcgaattcccggttgtgggcaggccctttttcattgagaattttgtactcaagcgatccttttccgtcccgctgtacaaattcttgaagctggcttttgaaatccatcacatgagaaaaagcaccatcgtttattttagggaacacgtacactttcaggaattgctgaaccgggtcaaggccctgatccagatacagtgcgccgataaacgcttcaaacacatccgctaaaagcgcaggacgctttctgccgcccgtcatttcttctccttttcccaagagaacaagatcgccgaatgacaattcatgggcaagtgagacgagtgacggctcgcatacgatagcggctctcagcttcgtcaaatctccttcactcatggccgggtatttggcaaataagaattgggagatcgtcagttccaaaacagcgtcacctaaaaattcaagcctttcattgtcttcatacggctttttccgatgctcattcacataagatgaatgtgtaaatgcttgatacaaaagtttctcgttttgaaaatgaaccgaaatccgttcttggaactctttaaattgctctatttttttatagaacttttttttatctttaaaatgtgagtgttttgacatagtaacctccataggcacatcaggttcaccgcgctccccgccgtaaacggaatcggcagcgcgtacagcgtcagacgccggtaaccgaacgattaaagggctaaagccccgctgtcaggcgggacttttagcatcagcttattgctggttttgtatgtagttcacagcgtcgccgactgttgcaatcttttcagcatcttcgtcagaaatctccatatcaaactcgtcttcaagttccataacaagctcaactacatctagggaatcagcacctaagtcttccttgaaagaagcttcaagtttgacgtcagcttcatcaacgccaaggcggtctacgatgattttcgttacacgctctaatgtatctgccatagcaattcacctcccctcaagtattatagaggattcgtttttaaaaaactagagaaactaggatgaaattttaaaaacaaatctttacatcaccattccgccgtcaatatgaagggtttggcccgtcatataacgcgatccttcagaagcaaggaacgtaacaacgctgctgatatcggaaggatcaccgaaacgcgcgagcggaatctgcttcagcatttcatcttggacttctttagaaagcttgtccgtcatatctgtggaaataaagcccggagcaatggcattgaccgtaatatttcggctcgcaagctctttggctgatgacttcgttaagccgattacaccggcttttgccgccacatagttcgcctggccggggtttccgctgacgccgacgattgatgatacgttgataatccggccggagcgctgtttcatcatctgtcttgtcacggctttcgtgcagttgaatacaccttttaagttaatgttaatgacgtcatcccattcattttctttcattctcatcagaagattgtcttttgtgatccccgcattgttcacgagaatgtcgattgaagaaaatgcagcgacagcctctttcatcatgttttgtacttcttcggaatttgatacatcggcttttaccgcgatcgcgtttcggcccaaagatttgatttcatctacgacttcgttcgctttcgcttcattcccggagtagttgactactacgttacagccgtttttcgcaagatcaagcgcgatcgcccgcccgattccgcgggacgctcccgttaccactgctgttttttcattaagcatcctgattctcctccttcagcgtttgaatcgccagttcgatggtttcatggtcagaaaccgcgattgttttaaggcggcggttcacttttttcacaaggcctgaaagcacttttcccggcccgatttcaacaaacgtcgtgacaccttcgtcaatcagtttgttaatggtttcttcaaagcgaacaggtgaatacagctgttcgatcagttttttcttgatatcgtctttttctgtcataacgtcagccgaaacgtttgaaatcacgggaacagccgcattttttaactcacaggcgctgagcacctcctcgagtttttgcgctgccggcttcattaattcagaatggaacggtccgcttacttctaatgggattgcccgttttgctccgttgtttttcgcttcttctgaagccagctccacgccttttgccgttccggaaatgacgatctggccggggcagttcaagtttgcaagctgtacgagatgaccgttttccgtcacttgatccgttacctttttcaaggactccgcatccatgccgagaatagcggccatggcgccttctccggccggcacggcttcattcatgaattctccccgttttcttaccgtgtaaacggcatccttaaatgtcatcgctcccgccgcaacaagcgccgaatattctccgaggctgtggccggcggtgaaatcaggcgtgatgccggattctttaaacttttccaatacggcgatgctcgttgtcaacagcgcaggctgcgcattgtatgtaagggttaattcttcggcgtcgccttcaaaaatgagcgagctcagctttgtttcaagcgtttcatccgcttcatcaaaaatacgttttgacgcttcttcgcgttcgtacaggtcttttcccataccgatatattgtgatccctgtccgggaaataaaaatgcaatcttactcatgatgcggtaacctccagactactcatctgttttttcttcttttacttcttcttctataaatgcggccacgttttggctgaccatttctctcgcctggcgcagcgcatggtaaacagcgcgtgcgtcagaagagccatgcgctttaacgacgggcgctttcaaaccgaaaagactcgccccgccgtactcagaatagtccattttcagtttcatttccatcagcttcggcttcagcactcccgctgcgagcttagaaacaaaacttgaagtcagtgtatctttcagcattttgaaaatcgataacgctgaaccttccaatgttttcaacgtgacgttgcccgtaaagccgtctgtgacaatgacgtcagcagcgccttcgagcaagtctctcgcctcaacgtttccgacaaaattcacgtttgtttcttttaataattcaaacgtcttttttgtcaggtcgtttcctttcttttcttccgtgccgacatttaacaatccgacgcggggcgagctgataccgagaacctgccgggcatatacagatcccataattccgtactggacgagatgctccggtttggcatcgacattggctcccacgtccaaaagaaggaaaccctcgcctgaaacggtcggaagcgtcggcgcaagcgcaggccggtcgattcctttaattctgccgacgataaacagtcccgctgtcatgagtgcgcccgtattccccgctgagatgcaggcgtccgctctgttttcagccacttcctgcgccatcagcaccatagaagagtttttctttctgcgtacggcgcggaccggttcatccgtcggttcaatcacttcatcggcgtgcaacacagtgatgcggtctgatgttgttggcaagtgtgattctatcgttgtcttgtcaccgaccagcgtaatatgaagatcgtcaaatgcctcaatactcttcattactccgtcaataacagctttgggtgcgttgtcgccccccattgcatctacagctattctcatgcatgctccacctttatgattgttttgaacggtacatgtcaaagctgccggagaacacgacttcttctcccacatagctgttgacttcaactaccgttctgcctttttctttttcgactgccgtcactttggctttcgcaacgacgcgctcgccttctttcacctgtcttgtaaagcggatatttgcgcttgcggtcagcgccagctcatcatcaatgacggctacggcgagtgagttcgcctgcgcaaataaatgatgcccccgcgcaatttgattgcggctgaagacatgctcgcgtcttacttctaatatggaaatggcctggccgtcaagctccagatcaataatttcaccgatcacttcgtctaaagacagtgatttcacttcatcatcaagcgtttgttctgccacgtttttaattctttccctcagctccggtattgagagctctaagcggtctaaacggatcgtctgaatgctgacgccgaatttccccgctaattcttcatctgtgatgaagggtgtcgatttgatcgtctgctgcaataatttttggcgttctttcttgcttcttctcatctgtaaacaccatccggacaattaagactaggtactaatagtagtatataatctcatagattggaatgcaatgattgttttttgaaagccgccgaattttgcagaatcagcttaatttctccccttccaggacgccgcttgaaagtaattgaccgcgcagcatgcggtattcgtcatctttccaaaacgcctctgaagacaccagattggccgcatcctggcgggccgtttccaaagctctgtagtcatgaaccatatccgccaccttgaactcgggcataccgctctgtttttttccgaagaaatcaccggggccgcgcagttcaaggtccttttcagacagctcgaagccgtcgtttgtctccgacatgattctcatccgttccttcccggtttcggatttcggatctgccatcaagatgcagaaagattggtggtctccccgcccgacccggccgcggagctgatggagctgagataacccgaaacggtcggcgtcatagatgaccataatcgtcgcattcggcacgttcaccccgacttctacgacggttgttgacacaagtacctgacattgattggcgctgaattctctcatcacctgatctttttcatcagaatggagcttcccgtgcatcaggccgacattccatttaccgcggtaaacgtcagacagcatgttatatacgtcaatcgcattctgtacatccagtttatccgactcttcaatgagcgggcagataatataggcttgccttccctgcttcagctctttttctataaaagccaaaatccgctccagcatgtcgtgtttcacccaatacgtttcgatttgttttcgccccgcgggcatttcatctatcacggaaacatccatttctccgaagacggtaatggccagcgttctcggaatcggggtggctgtcataaacagcacatccggatcctgacctttattcttgagttttttgcgctgttcgaccccgaaccggtgctgctcgtccgtaataacaaggctcagcgctttgaattccacttcatcctggattaaagcatgggtccctactaaaatatcaatctctccgagagcaagccgctccaaaagctccctgcgccgctttcctttgacagaactcgtcaaaagcgcgatatttacatcttcatttgcaaacaacgatacgagagaatctgcatgctgttcggccagaatttcagtcggcaccattaatgccccctgataccccgacaaaatcgcagcgtacaaagcgatggcggcgacggccgttttccctgaaccgacatcaccttgcagcagacggttcattcggtaaggggatgtcatatcagcggtaatttcccgaagcacacgcgtctgtgcggttgtgagcgaaaacggcaggctgtctgtgaaagcggcgagcttttcagccggaaacacatggctgatgccttttgactgttccctttccgctttacggaacgcctgcattttcagctgaaataataagaattcttcgtaaacaaaccggcgtcttgcctgctgtaacgattccctcgtttcaggctgatgcatcgtctgcagggcatgtttgtagtcaggaagcttgtagcggattctcaatttttcaggaagcggatcagccgcactgtccaaatgatgctgcagcgcttccttaataaaccgtctcatcatttttacggtgacgttttctttaacggaataaacaggctcaatgcttttatcttcttgatgaggaccgttttttaattcctgcacggaaacggtctgtctgtgtttatcccatttcccggatatcgtgacgacagaacctaacgtcagtttcttttttaagtagggacggttaaagcagaccgcggtaattaaataattgccgacaagcaccctgaatgtcagcctgtttcgttttttgccgtaataggtaagagaaggttctgaatgaaccttcccttctaccgtcactctttcttcatgttttacttcttctaaatccctcagctcatagtcgtcataacggtaagggaaataattcagaagatcagaaatgtcatagataccaagttcgtgcaatgttttttctgtttccggcccaatgcccttaatatccgctatactagtttgctgatggtgtgtcacttgatttcagcgctcctccgaaaatttttttctctaattctcttcccgtcggtgtcgcggctaaaccgccttgtcccgtttcacgcagtgctgtcggcattgtctggccgattttgtacatcgcgtcaattacctcatcgcaaggaatgcggcttgtaatcccggccagcgccatatccgccgcgatcattgcgttggatgctcccattgcgtttcgtttgacacacggcacttctaccaatccggcgaccgggtcacatacgagaccgagcatatttttcagtgtaatcgccattgcttccgctgattgctgaggcgttccgcccgccatttccacaatcgcagccgctgccatgcctgatgctgacccgacttccgcctgacagcctcctgccgctcctgaaatactcgcattgtttgctacgacaaaaccgaacgcgccggctgtaaacagaaaacggatcatttgttctgttgtagggttcagcttatgctttacggcgaataacgttcccggcacaaccccggcagagccggcggtcggtgtagcgcagatcgttcccatcgccgcatttacttcatttgtcgccacagctttagaaacggcgtctaaaatcagatttcccgacaggcttcttcccgattggatgtatgcctgaagtttcacggcatctccgcctgttaaaccggtctgactcgtgacgcccttcagccctttttcaacagctgcttccatgacggagagattgcgctccattccttgaaagatttcttcccgcgttttttgcgtcacttccatctcttgcgtgatcatcacttccgaaatcggaatttgtttttcttgagtgatttctattaattcttttacattacgaaacatgtcattttcctcctgactttttagtcagctatcttagtaacctgtataatattaggaagtgttgaaagctcgtcaagcacttcttcttcaatattctgatcgacctcaatcgtcatcagcgcaagctggccgacgtccttacgcgccacttccatatgtccgacgttgatggagaatttcgccagcacattggcaacgcctgcaatcgtgccgaatttatcattgtgaacgactaaaatagccggatggtttccggaaagacgcagctcaaagccgttgagctccgtgatttctatttttccgccgccgatggaaataccggtaagggcaagctctccctcatcatcagaaatgacgatacgcgctgtattcggatgaaccggcacggcatcctctgtacggaactctacatatatgcccttctcttccgcaatttgaatcgctgttttaatccgttcatcaaatgtatcaaaatcaagcaggccgccgataatcgcgacatcagtgccgtgacccttatacgtctccgcaaatgatccgtaaaaagacacaatgatccggcggggctcccgcctgaataggcttctggccactctgccgatccgggcggcgcctgcggtatgtgaactggacggaccgatcattaccgggccgataatatcaaaaacgcttctatacttcatgctggtttgttcctccttaacatcacttcattcagcgcttttctttagactaattgaacatttctcaattggcaagcaggcacactgccgcactgccgcaggtaaataaagacataagaatagaagggcctgataagcccttctattctgccgcaaatatatatggatacagaggctgtctgccgttatggatttcaacctcgatatcttcacagacgctagcaatatactcagcgagtttctcagcttcttcttccggcgcgtcctctccgtacaagatggtgacaatttcatcttcttccccgatcatttcatccagcagcaatttcgccgcacttatccgatcttcggcgctgccgataattgaactgtttaaaatgccgataaaatcaccttttttaatatctttgccgtcaatatgggtgtctctgactgaatatgtcacctgtccgcttttcacattccggatggcctcaagcatattggcttcatttacgtcagccggctggtcagggttaaacgcaagcagggcggtcatgccttgagggaccgtttttgccggaatgacaatgacattttcttcagccacgctcgccgcctgattggcagccatcacaatattggaattgttcggaagaatgaaaaccgtctccgcattgacagactgaacggcttcaacaatatcttccgtgctcggattcattgtctgaccgccttcgattacgtgtgaagcgccgatgctcgtaaacaattcagaaatgccctctcccattgccacagtcacgatgccaaaaggcttgcgggcttctttcataacgccggccggctttttttcatcatgttcttggctgatgattgaagtatgctgttccctcatgttttcaattttaattttaatcaaatcgccgtaacgctgtgcgagattgagcacgttccctggttcttcggcatgaatatggactttcgccagcgtatcatcagccacgaccagcagtgaatcgccgaaacggctcagttcgtttctgaacgtctcttccttgaacgtccgtttatcttgatccagcctcaccatcacttccgtacaaaatccgaattcaatgtcttctgtactcagcatgctctgcgcgcttttatgatgctcggcattcaccatatcatcgagtgccggaagaaccgcttttttcggtacggcctctccttttaaagcagccaaaaagccttcatatacacaaagcagaccttttccgccgctgtcaacgacaccgacgtcctttaaaacaggaagcagatccggcgtgcggttgagcgacgcttccgcttcttcaataacggcctccatgaccgaaataatatcggtttcttctttggccgaggcgaccgcttttttagccgcatccttagccacggttaaaatcgttccttcaaccggtttcatgaccgccttatatgccatatccactcccgcttggagtgctgcggcaaattcttgggcgtctatttggtttttgttttcaatgctctttgtgaaacctctgaacaattgggacaagatcacccctgagtttcctctcgctcccataagcaggccttttgacagggcgatgccgactttgccgatgtcgggtgagtcaatgtgctctacctctcttgcaccggatgacatcgataaattcatatttgttccggtatcgccgtcaggcacgggaaacacgttcagcgcatccaccgcggatgcgttttgagacaatgtctcagcccccgccagaatcattgccgcaaaagctctcccatctaagtttcgtctagacaatactcatcctcctcactacgggttcgttactcgtacgccttggacataaatatttacagaatcaactgcaagtccgattgtttgatttactgtgtattttaccttcgtctgaacattgtgggctacttcggatattttagtgccgtagctgacaataatgtacatgtcgatatgtatttgttcggcttcctgacggacatgtacgccttttgcgaagttctctctccggaggatttcagacaaaccgtctttaatctggttttttgaggccatccccactattccgtaacaatcaatggcagcgcctccggcaaccattgcgatgacttcgttggatatatcaatctgtccgtattttgtcttcatttcaatggacacacaggttcctccttcaggtgcatagagttatcattattctactatatgtatcccattatgaaaagaaaagatacagacagcggccttcagcgcggaaatgtgattggttttacatgtcaagtgatttttcttgaaagtaagggaaacaatagttgcaaacggtttttagctgtggtaaattatttaaagtattgtataacgaaagcatctgagacactatgtttgaaaagatgtttcgcgcagttaggagggaaacaaatggcacgtaaatgttttattacaggtaaaaaaacaaaagccggaaacaaccgttctcacgcaatgaacgcttctaagcgtacttggggcgccaaccttcaaaaggtccgcatcctcgttgacggcaaacctaaaaaagtgtatgtatctgcccgggctttaaaatccggtaaagttgagcgtgtataagcaaaaatgaacgcctgcccttttatgcggcaggcgttttttatgcgttcaaagagggcaatttcagcttcttgggcttactcttttctaaatgagcccagcatcgcccggacaattcctcctaaaaacttcggcaatttaatggtataaaatttcattttgtcccctcctataagtcccgtatccgctgcgttcatcactttaggattcatggttttttccgcatatggcagaagccgcttttctaatccgcgctccttaccattattaatatgccttttgcaaacgaaaaagtacctcgtgaatgaatgagttcgttactaatacatagtgttgaacccagaggaatatgacaattttcaaggggatatttaaaaccgtcgagtgtcaggccgtctgccgcttccgtaaacggaatgaaagaaatatagcgtctgcgcgctttttcttcaattgtataacggccgggcccgaacatctgaatgtcattctgccggtcgatcagctcgacatcggtattcttgtgtaaggctttatacagcagctggatgttccctaaaaagtgatcggctcttccgcccgtcacaccgaatatccgaatggtttccggttctttttgtaaagcccagtcaagggcgagttcaagatcggtataatctttttccgcctgatacacatggagggccggcgccgctttttgaatctgcatgagctcctcttccgtaatgctgtcaaaatcaccgaaagcttcctgcggaatgattccggcttccaaaagagcaaccgtccctttatcgactccgacccacgtcgtatctccgtcagtgtattcggatagatcgggaataagctcccgcgggccgcccgcaacgatattgattgtcctcatatgttttcctctcttttagacgcgaaaagagccggcggctttcaccgggctctttttcagcatgtttattacgcgtttcggatgtcagcgatggcttttttccgatccggctgattatatacggcagacccggcaacaagcagattggcgcccgcttcagcgcataaaggggctgtttctttattaacgcctccgtccacttcgattaaaagctcagacaggcctttctcctcagccagctgtttgacctgacggattttcggcagaaccgaatgaatgaagcgctggccgccaaaaccggggttaaccgtcattaacagcacaaggtcaagttcctcgatcacatgttcaatcatttggacgggcgtatgcggattgagcacaactcccgcttttaccccctgctcttttatcaattgaatggtccggtgaagatgcggacacgcttcagcatgaacggaaaggatgtccgcgccggcttttgcgaatgccggtatgtagcggtccgggttttcaatcataagatggacatccagcggcagatcagtcaccggacggacggcttcaacgataagcggcccgattgtaatgttagggacgaaatggccatccatgacatcaatatggatatagtccgcccctcctttttccacgtctttaatttcctcgcccagtgaagcaaaatcggcggaaagaattgatggcgcaaccttaatcatattaatacctcggctttctctcttttatttcctgcataaattctttgtaatgctcatagcggtacggctgaatctctccttcttccaccgcttgctttaccgcgcatttcggctctttaagatgcagacagcctctgaatttgcaagaggcgcttatttctctgatctcagggaacgtgctgcccagctcttcttcctcaatgccggtaaattcaagcgaactgaaccccggagtatccgccaccagaccgcctgatgtatgaatgagctccacatggcgcgtcgtatgttttccgcgtcccaaatgcgcggaaatctcatttgttttcagctcaagctccgggctgatcgcatttaaaagcgaagattttccgactccggactgaccggcaaacaccgtcgttttgttctcgaagtgtttcacaatgcctgttaagccgctgttttcttttgatgacgtcacatatacgtcataaccgatcgcctgatagtcttgcacgtaagaaagtatcgcctctttcgattccccgtctgcagctaagtccattttggttatgcagatgatcgggtgaatgccgttggcttccacaaggacgagaaaacggtccaataaagacgtgctgaacgccggctgaacggcagaaaagacaagaacggcctgatcgacatttgaaattggcggcctgatcagctcgtttgttcgttctttgatttccagcaggtagccttctttatcattttcagcctgataaacggcataatcgccgaccaggggcgttattttattttttctgaaaatgccccggcccctgcattgaatgatcttgtcctgtgattcatccaagacataatagaatccgcttaacgcttttataattttgccctcaggcatagggtccctccttgtcagtcattatctttcgggtattcaatcgttttgtagctgacgactttatgatcgaccatcacttgataataccccttctgtccctgatcaatcttcagttcaattgttttttcagtcggctcttttattttaaaagagtcatacgtatcagagatgctgtggtccttatcatcgatggcgatttgcacttcaagctcgtccccttcatgttcgggttcgtaaggaatgctgattttttcttttaccgttttcgccggtttttcttcaggtccgagcgagaacgtcacttcaacattacttcccggcttaaccgcagtgccggctgccggctcttgcttcatgacttgtccttccggcacgtcatctgaatgggcttgtttttcaacaagctgcaggccgttatcttcaagataccctgaagccgcttctttgctgtaagtctttaagtccctcagcgtaacgtccgccgggccgaggctgaccgttagattgacttcatcgtcgcttgcgaccatatcggtgccggctgaggggttctgatcaattacggtgccggcctcgctgtcatcgttttcttctttgacattgacatgtttgaagcctttttccttcagcgctttttttgcgtcgccgatctgccgccctttcacgtcgatcagctgggttttcggttttccgatgcttttgtacagttttacagaagagccttctttaacggtagaccccgcttttgggtccgttttgaccattaattcctcttctattttttcatcttcaatatccgttatatcaggatccgcccggagcccgttcttttcaagcagggcttccgctttttcgtacttcatgccccgtacgtcggggacgcttacatctttaggcataaacaaagacgggaacacggtgaccgcaagaacagctgccataatgaaaatgaaacagacggccagcaaaacccacggccatttccgttttttctttttggcgggctgctgttccttatcatccgtctcccccggcgtttccgcctgaggcgcggcttttgcgccgtcagtaataacgggaatggcttttgtcatttcctcatcatcctgcacggaaaatttttgttcattcagcctgccggcgtcaaaagccgttctgatgtccgcttccatgtcctcggcgctttcatagcggtgaaacgggtctttagcggttgcctttaaaataatgttttcgacgctctgcggaatggaagggttccactttctggcggaaggcgtttctgtttgcagatgctttagcgctatgctgacggctgattctccgtcaaaaggaattttacctgttaaaagctcaaacagcacgatgccgagcgcgtaaatatctgattttttcgttgccagaccgcctctcgcctgctccggagacaaataatgaaccgagcccagcacagaattcgtatgtgtgattgtcgtagacgtaagcgctgtggcgatgccgaaatccgtcaccttgatatgccctaaatgatctatcaatatattgtgcggtttaatatcccggtgcacgatatggttttgatgggcatgggcgatggccgagacgatctgctccataacggacagcgcttctttcggatgaagcggtccgtgtgcgtttatgtattcctttaatgtcatgccttccacatattccatgacaatgtaataaatatcgccttcctccccgatatcgtaaatactgacgatattcggatgatcgaggcttgatgccgactgtgcttctcttctgaaacgcctgataaaatcaatgtcattcacaaagtcaaaccgcagaattttaattgcgacttcacgttcgagaatgatgtcctcagctaaaaaaacgtttgccattccgccgccgccaatgggccggaggatatgataacgcccgctgatccgcttgccggttagcacttgtcttcaccctcttttgcatctgcggaaaactcaatcaacacagccgtgatgttatcttcgccgccgttttgattcgctttgctgatgagaaggtctactttttcctgaggatcagattcggcttgaagcatttgtttgatttcgtgatcttctattttatttgacagtccgtcagagcataaaagcagctgatcgccgtcagacagttcaaaagaacgggcgtcgggactgatggtttcatctgtccccagcgctctcgtcaatacatttttccgcggatggtgctcggcgtcctctttcgaaatttcccccgtcttgaccagctcattcacaagcgaatggtcctcagtcagctgagtgaattccccctcttgaagcaggtagcaccggctgtcaccgatatgagccacagtgacaaacttcccggtgaataaggcgcaaacaacggtggttcccattccccggcattcttcattcgctttagcgtggtcatgtactttgacattcgcctcatgaatccggtctttcagccaatcctcgcaagcagacggcagagaaggaaccgtttcggtccggttccactgctcttccatcgccgcaaccgccatcctgctcgctacatctccggcaagatgaccgcccatgccgtcggcgacaaccgcaagcaccgcgtcttcttttgtgaaaatgcccgccgcatcttcattatgccggcggactttacctgtatctgttttcaaggctgtaatcaacctcttcacctcgtctcgtcttgacgctccttcgcgcgaagctgaccgcaggccgcgtcaatgtcatggccttgctctcttctgatcgtgacatttacaccgcgggattttaacgttttttcgaatgcgaaaatctgatctctcggtgtgcggacgtaatcccgttcaggcacatagtttaccggaattaaattgacatggcatttcacgtcttttaacagttctgcaagctcttctgcatgttcgacctgatcatttacgccgccgaacagcccgtattcaaagctgatccgtctgcctgttttctcgatgtaatatttgacggcctccataaggtcaggaagcttataggctttgttaatcggcatcagacggcttctgatttccgtattcggagcatgcagagaaatcgcgaaattgatctgcattttttgatcggcgaaatcgtaaatcttcggaatgattccgctggtggaaactgtgatatgacgcgctccgatgttcagccctttatcgtggttaatgattttcaagaaagcgagcatttcgttaaagttatcaaaaggttcaccgattcccatgatcacgactgagctgacgcgttcatccgtttcatcaagcgccttttgcactttcacgacttgagcgacgatttctcccgcttcaagattccgtttcagaccgccgagcgttgacgcgcaaaatgtgcagccgatccggcagccgacctgtgtcgttacacatacagaattaccatactcgtgtctcattaaaaccgtttcgatcgtataaccgtcatgaagctcaaataaaaatttcatcgtgccgtcttgagatgtctgttttacagccgttttcagcgttgtcagcacaaaatggctctcgagtttttcacgcaggctttttgagaggtttgtcatttcatcaaatgaagaaacccgcttttcatagagccattcaaaaatctgtgccgcgcggaacggcttttcgccattgtcggtcagccattgtttgatttcatctaattcaaaagagtaaatggacggctgctcagtccgcagctctttccgtacgcttgtcttttttaattgtgtcattttttatcccttctttctcatgctgctaataaagaaaccgtctgttccgaaataatgcggaagaatttgaaggcttccatcctgaacaaagggtctcgccttttcaggcagccgcttttcaagagacaaatcgggttcaaactcagggtgttcttgtataaacgcatgcataacttcttcattttctgtccggtccattgtacacgtactgtatacgagtgtgccacctttttttactaatggggcgatttcccttaaaatgccgagctggatttctgacagccgtctgctgtcctccggcgtcttcgtatatttcatatcgggttttcttctgatgacgccgaaacctgagcaaggggcatcaacgagaatacggtcaaaccgttctgcgccaaaggcctctcccgctttccgcgcatccatcgtttgtgcgtcgatgatcgtaagtccgagccgttctgcgccctctttaatcagcttcactttatggcggtgaagatcaagcgatgtgaggctcccctcgttctccatcagttccgcaatgtgagccgactttccgcccggtgcggcgcatgcgtctaaaacggtttcgcccggcttcgggtccagcgcccgcgcgacaagcattgagctttcatcctgtatggatacccggccgttttggaaaaatgccgtgttcgcgatgcttccttttaaaagcttaatcgcatcaggagaaaggtctccggcttccgcttccagaccggcattctccatctcattcagcaccgtttccctgtcgctctttatgtgattgacacggagcgtctgcttcggcggaatgagatgaatccggcagatcttttcagccgcctcaaagccgtacgcctcgacccactcttttacgagccattcgggatggcttgtctctgtagaaagacggagaaccgggtcttcaatttcagcgaatgacggcgccccctcacgctgcagggagcggaggatgccgttgacaaaggacgcaatgcccttatgcccgcgttttttggcgatttcaaccgcttcatggatggcggcgcgatccggaattttttctaaatactccatttgatacgcggacagacgaagcagctgaatcacccacggcttcaccttattcggctttcggataaaaggcttcagcataaagtctaaggcgattttattttgcagcgttccgtagacaagctctgtcagcagccctctgtcctgatcgctgagcgtgttcgttttgataaccgatgtaagaagcaggttgctgtatgcctgattttgctcaagcttctcaagcgcttcgagggcgagctcccggacattaattttcttcatttgcttctcctaacacgtcaccgggctgcacatttttgcctcttacaaaatcttcgcccttcatccgtttttttcccgccggctgcagctcagtgattaaaagggctgtgctgtttcctgatgcgacgacaatgccgttttgctccgtgcggatgactgttccgggcgcagcttcagtttttgccgcaactttttcagaagcccatactttaatagtttgaccgttcaaagttgtataggcgacaggccaagggtttaaacctctgatctggttgtaaatctcttctccgggctttgcccaatcaatccgctcctgctcacgcttaatgttaggcgcgtaagtcgcttttgattcgtcctgtttgatcggtttaatattcccggaaatgacgttcggaacggtctctgacaaaagctttgcccccgctatgcttaatttgtcgtgaagcgtgccgacgttatccgtttcatcaatttccacttcgattttagaaatcatatcgcccgcatcaagcttttcaaccatatacatgatcgtcacgcccgttttcttcttgccttggagaatcgaataatgtatcggcgctccgcctcttaattcaggcaatagtgacgcgtgtacgttgatacagccgtatttcgggccgtccagcagctgcttggggaggatctgtccgaatgccgccgtaacaatcaggtccggcttcaggctgagcactttttctatttcttcttcgagccttactttttcgggctgaagcacgggaatgccgtgacgttcagcttcagcctttacaggagggggcgtcatgattttttttctgcctttcgggcggtcaggctgcgtaacgacaccaaccacttcatatccgtcttcaataagcgtgcgcaggacgggaactgaaaagtcgggcgttcccataaaaacgatccttgtcatccaatcatccttccatttctgccagttcttcttcagtgtagtaagccgtaatttttgatgtgaataaaatgccgtctaaatgatccatttcatgctgaacggctctggccaaaaaaccctccgcttctaaaataaacggttttcctttacggtcataggcttttacctttacgtaatccgggcgggtgacatcgccgtaaaccccgggaaagcttaagcagccctcgactccggtctgttcaccgctcttttcaagaataaccggatttacaaggtcgatccggccgctttcttcaccgatgtccacgacggccgctctttttaaaatgccgatttgcggcgcggcgaggccgacgccatccatttcgagcatcgtatcgtacatatcatcaagcagtttttttaattttttatcaaacactgtcacttcttcggcaggtgtttccagaacctccgccgggtgtgtgacgattttttttacagccaaaattttgccctccaaaaactaatgttacatcagcatgtacggattcatatcgattgaaatcattacatgcttttgcgcaatgtcgcgtttatagtgctccagtatctttttcaactgaatctgcaactcgttttcctgtctgtattttatcacgcattgatagcgatatctatctttgatcctggcgatcggggaagccgccggcccgagaattttcgtatcaggcccgcatcccgctcttaaatagtttgtaatcttttctgcggtgaccgcggcttttgccgcttcttcatgagaaacggtcaccagcgccacgtaataataaggcgggtatgactgggcccgtctgtgcgccatttcctgctgaaaaaaagtttcatagtcgtgcgttttcgtcagctgaatgctgtaatgagacggtgtatacgtttgaatgaccaccgttcccggcttttcatgccgcccggcccgtccgcttacctgcgtcagcagctggaatgtcttctccgcagccctgaaatcagggatgtgaagcgtcgtatctgcgcttaatactccgacgagcgtcacgttcggaaaatcaagcccttttgcgatcatttgcgtaccgagcaggatatccgccttcccttcaccgaacgctgacaacagtttttcatgggcgccttttcttgaagtggtgtccacatccatcctgatcacgcgcgcctgaggcagcactttggtaagctcctcctccacacgctgcgtgcctgtgccgaaaaagcggatatgttcgctgccgcattccgggcatgttcccgggacaggttcctcatggccgcagtaatggcatttcagcctttgtccgtagcggtgataagtcattgaaatgtcgcaatgcggacattgcggcacataaccgcagtcccggcacatcacaaacgaggaatacccccgtttattcaggaaaaggacagcctgctctttttttgcaagcttctcttccagctgttccatcagctctcttgaaaacattgatctgttgccgtttctcagttcttctctcatatcaacgagagaaacgtcaggcatgagctggcgatttacgcgatgttttaacggtagcagctcataaacgccttttttcgcccgcgcaaatgattccaatgtcggcgtggcgctcccgaggacgaccggacagctgtgatgctcggcccggcggatggctacgtcctttgcatgataccgcggcatttcctcctgcttataggaagattcgtgctcttcatcaataatgatcatgccgagattttcaaacggggcaaagatggccgatctggctccgacaacaagccggacttccttgcgctgaatcttccgccattcatcgtatttttcacctgtggataatccgctgtgcatgaccgcaacctgtgagccgaagcggcctttaaaacggttgaccatttgcggtgtcaacgagatttccggaacgagcacgatggcttcttgtccttttgccagcactttttcaatggattgcaggtaaatttccgttttgccgcttccagtgacgccgtgaagcagaaagacgtgatggacatggtcggctacggcttgtttaatcggctcaaaagcagcccgctgctcttctgtaagagagagcggctctgtttttttgaacattctgtcctgatagggatcgcggtaaacctcctcaaagctttccgtaagaagcccctttttaagaagcgttttcagcgtcgcggaactggaatcggtctttttgcaaagctcggccgcggaaatctttgctcccccgccgataaaataagtaagcacggcgagctgtttagaagcctgctttgtcaatgaatctgcgtgccgggcgagttcttctttgtctgcccccgcttcgatcatgcggatcatttttttattcgttttttgggcgactttatatgtgacatcaatgcttcctttgcgcacgaatttttgaagtgacgaaagaatgctttcatcggtaatatccgagtacagaagacttttttgattcctgaaaagctgtttgatgtccggtgtcagcgcttcttcgtcaacgactttcagctctttctcgtacttcgccttcagtgcggcgggcagcattgcctgaagcgccgtaattttaaacgacagcgttttgtcagaaagccatgaagacagctgcatcagttcctcagtcagaacgggcgtcaaatcaagaagcttctcgacttccttcattgagccgccgtttaattcagacgaatctttcaaaccggtcacaaatccttgaagcttgcgcgggccaaacgggacaatcacccgcatgccgacttcgatcatcccttttaaatgatcgggaattttgtaatcaaagggtctgtcaatgtttttggagctgacatcgacaatgacttctgctacattcatacgggttttcggtcctcggctttcaaagcggtcatttccttcagcatttcaaaggaaacgtcaagtttagacataagcgcaagctcccgttttcttccgtcccggaaatagaaggtgacgacattcgtatccgtgccaaatccggctccttctgctttcacatcattcgcaacgatcatatcaaggtttttctgttcgagttttctgcgcgcatagcgttcgacgtcttgcgtttcagccgcaaatccgaccagcagctggtgtgttttccgttcgccaagttctttcagtatgtctgccgtacggttgaattcgatcacgagcgaaccgtctttcttcttcattttgtgatcagaaacagccgccggcgtaaaatcggccacggccgccgtcttaatcaccatgtcgcatgaatcaaacacagaaagcacggcttctctcatatcagctgccgattgcacaggaagaaactggtacagcccgactggcggctctattgacaccgggcctgaaatcagcgtcacccgcgccccgagacggacggcggcttcagcagcggcgtagcccattttgccggtggatttatttgtgaagaagcggacagggtccacggcttcgcgcgtcggaccggccgtaatgacaatatgttttcctttcagcggcgcatcgtctccaggctccttaaaatgctctctgacacgctcaacaataagctccggctcctccagccttcctttgccgacatatccgcatgccaaatagccttcactcggctcgataaagcggaccccgtcctgataaagcacagagatgttccgtttcaccgccggatgatcatacatatggacattcatcgcaggcgccacccagaccggggcctcagccgccagcaccgtcgttgtgagcatatcgtcagcaattccgttggcaagctttccgatgatatttgccgtagcgggcgcgacaataattaaatccgcccagtcagcggcatcaatatgagaaatcaccttcggattttgttcattaaatgtatctgtatatacttcattccggctcagcgcctgaaatgtcagcggagaaacaaactcacgcgcggactcagtcataatcactttgacgtttgcgccggcctgaaccagcttgctcgtgagtgcggaagctttataaacggcaattcctccgcttacgcatagcaaaatgtttcggtttttcatgaagtcttctcccctttatgaaagcattggacaaatcccaaacggaaaaaaataacaacctatgtagagataggttgctacgtgtgcttgttattcgctgtcttctctttcaaacgaaagcaggcccgcgtcaatttcttctaaagctttgcctacatatttgtgagaaatggtatgttcaatctgctggtcttttttgatctgcatttcacgcgcgcgtcttgcagacacggtcaccagcgtatatttagaatctaatttattcattaaagagtcaattgacggatctaacataagttattctacctccagcattttcttatatctcggagcgacgcgttcacgttttaagtgctcggcgagaacgattgcgttaatcttatcacaagccgtttggatatcgtcgttttcaacgacataatcatacgcgtccatcatttcgatttcagcttttgcggcattcattctgttttcgattaaatcgtcggtttcagttcctcttgtcacgattctgttttttagctcagaaagactcggcggcgctaagaagataaacaggccttccggaaatgcattccgcacttggagcgcgccctgcacttcaatctctaagaagacgtcttttccttcttgaagcgtctgttcgacataatcaacgggcgttccgtaatagttgccgacatattctgcccactcaagcagtttgttgttttcaatcatgcgttcgaattcatctctggatttaaagaaataatcgacgccatcgacttcgccctctctcgggtttctcgtcgtgactgaaattgagtattcaaatttcgtgtcctgttgtgaaaatattgcttgccgaaccgttccttttccaactccggagggacctgagagaacgattaataaccctctttctttcatgcggcaattacccctgcccttcatccataatttcttctttcacagaaagtctgtgtgcaactgtctcaggctggacggcagataagataatgtgatcactatccatgacgacaactgcacgggttcttcgtccgtatgtagcgtctattagcattccgcggtctcttgcatcctggatcattcgctttattggcgcagactccgggctgacaatcgaaatcatccgattggcggagatgatattgccaaatccgatattaatcagtttaatcgtcatcttctacgttccccctgtaaaatagacgtctctagtgtaacctgaagaggccgtctgtaaacaatacgcacagtcgctattctatattttgcacttgttccttcaatttttcaatagaacttttcatttcaacgacaagctttgtgatttgatgatcattggcttttgagccgatcgtgttcgcttctcggttaagctcctgaacaaggaaatcaagtttgcggccgactgccccgccttcttttaatatatcacggaattgaacaaaatggctcttcaacctggtaatttcttccgttatatcagaacgatcggcgaaaatggcgcattccgtgatcagccggctttcgtcgagcgcatcctccgtccattccttcattcgggcgtaaagacgctcgcgatattgaataacaacggccgaagcgcgctcttttacctgttcggacagcgtctcaagccgctcaatgtgcagaaagcagtcttccgccaaaagccgtccttctttttccctcatgtcacaaagttcctttacagccagctcagcggcttccctgatgacttcttcaagcttgtcatcacgcatctgttcttcgtgtatctgcgcaatatgttcaaatttaaagaaatccattgcatcgggttctgcggccaggctgtagcgctctttcatgacgcgtgcggcgctcacatattcatcaaggagctcccaatcgatgttcaggcttctttttatgagctcgtcactgtttacagtgagaaacagctctactcttccgcgctgtatatgctgcaatatcgtttgtttcagcttatcctctacatatagcaaaggccgtggcaggcgggcgttcacttctttgaaccggtaattgacggatttcaattcaacggttgccgagagatcgccttttgtgctgcttgcgctgccgaagcctgtcatactccgtatcatatgaaacacccaattctttcccgttatcaaaataaaagggcaatagacatgctattacccctaagattatatcatatggaattatttttttcttgtcaaaagtgaacccgccagcaaaaaagtaggtatgcccgacataccgataatcagcatccaatcgcccggcgtaatcggcactgttttgaaaatcggctgcagcggcggataatagatgacgatgaccatcaggaagatagaagaaatgatggccccgagcagatagatattttcaaacggattccgggagaaaacagacgtttcgctccggcagtcaaacacgtgtataagctgagccaggacaagagtcgcgaatgcaacggtctgtgcgtagggcagattttcaggattgcggtgatagacgatgataaacgctaaaatggttgcggctccgattagaaacccccttgatacgactttccagcccagttttctcgcaaacactccttctttcggatgccgcggcttccgcctcatcagatctccttccggctgatccataccgagggccatcgccggcagcccgtcagtgactaagttcacccacaatatctgaatcggaacgagcggcagcggcagagcgagaagcatcgcaaacagcatcactaaaatttcaccgacgttggaggcgagcaaataccggacgaattttcttatattttcatagatattccgtccctcttttatggctgatttaatcgtagcaaagttatcatctaccagaatgagagaagaggcttcctttgccacatccgttcccgtcacgcccatggcaacaccgatatctgcctgctttatggccggcgcgtcattaaccccgtctcccgtcatggcgacgacgtgtccgttttcctggaacgctttgacgattttcaatttatgttcaggcgatacgcgtgcgaagacgtagacatcatcgaccgtttcgataagttctttgtccgtaagctcattcagcgtcttcccgtccatcacacgcccctttttcggaagaagacgcaaatcttttgcaatggcctttgccgtttcgacgtgatcccctgtgatcataaccgttttaatgccggcttcacggcattctttaatcgcctgtctgacctccggacggggcggatcaattatgcctgacaagccgagcatcgtcagatttttttccgcctgctccattgtcggcttttctccgggcttaagcggtttataagcaatcgcgatcgtacgcaaagcttgcgacgccagctctttcagaaccgcttccgtttctgctttcttttcttctgaaaaaggcgtacttcttgcgccgtgcatcagatgtgacgagcggtcaatcagcacatcgggcgctcctttagtgatgacgaactgctttttttcctgatcctctacaatgacggtcatcattttgcggacggagtcaaacggaaactcggcaaccacgcggtagtgcccgctgagccaatcgtttgaatagccgccctttcttgcagccgtcagcagcgctccttctgtcggatcgccgtcgagtacataacggccgtctttcagtgcgatttcggatgtgttgcacaacgcgccgaaaaccagcatctgttcaagaatcttctcatctttcggcttgatttcccgctcatctcgggtgaaaacgccctccggctcatagccgatgcctgacactttataaattttgccgcctgaccacatatgggtgacggtcattttgttttgtgtcagcgtgccggttttatcagaacaaatgacagaggcgcagcccaatgtttcaaccgccgggagctttctgacaattgatttttgtttgatcatgcgctggacgccgattgataatgccaccgtaacaatggcgggaagcccttccggaatcgcggcgacggccaatgacaccccggccaaaaacatgctgtaaagatcatgtccctgtaagacgccgactgcaacgaccaataccgttaaaaggagcgcgacgataattaaaattttgccgagctcttcaagtcttcgctgcagcggtgttgaaaggctgccggcggattccagcatatcggcgattttgcccattgccgtattcattcctgtaccgacgacgacgccgacaccgctgccgcgcgttacgatcgtacccataaacgccatattgctgatgtcgcctaacgaaacatccggctttctcagtttatcagcttgtttaaccaccggaattgattccccggtcagcgccgattcctcaatttcaaggcttttcgcttcaacgatccgcacatccgcgccaatccggtcgccgcttgaaaatttcatgatatcgccgggaacgagctccttggactgaattttcttccagctcccgtcccgcaacgctgacacatacggcgttgacagctcttttaatgcgtgtaaggacttttccgcccgccgctcttgaaaaaaaccgagaaccccattgacaaatacaatcgccataatcgctacggcatctacatattcgcctaaaaacccggatattaaggttgccgccagcagcacgagcaccataaaatctttaaattgggcgaaaaacacggcgatcgccggtgtcctcttgccctcctgaagctcgttcggcccgtgcttttcaaggcgttttttcacctctttttcggtcaacccctgtttaatggacgtatttgttgctttcagcaaatcggtttgtcccatttcatgaaacttcattcttctcgtccactcccctgcctcgctttagagatgtcactctgtaaacaagcttattctgactcgtcccttttcatgctataattatcgaatgcaggaagaaggaaagggtgttttatatgtcttttgatggcatgtttacatacggaatgacacatgaattaaacagccggatcgccggaggccggattacgagagtccatcagccttttaagcacgatgtgatatttcatatccgcgctaacggaaaaaaccataaattattattatcggcgcatccgagctattcacgggtgcacatgacaaaccaggcctatgaaaatccgagcgagccgccgatgttttgtatgctgctcagaaagcatatagaaggcggatttattgagaaaatagaacaggccggattagaccggattatgatattccggataaaaagcagaaatgaaatcggcgacgaaaccgtcagaacgctgtatgtggaaattatgggacggcacagcaatattatcctgactgacggagaaggagcgattatcgacggactgaagcatttatctccgtcgatgaacagctaccggaccgttctgccgggctatgattacaagcttcctcccgctcaggaaaaaatttcgccgcttgccgcggatgaagaggacgttttgcgttatctcagttttcaggaaggacggcttgaccagcagatcgtcagacatttctccggtgtttctccgctgtttgcaaaagaagccgtgcacagagcgggcctcgctaacaaaataacgctgccgaagacgctgattgaaatgttccatgccgtgaaagattgcaggtttacaccgaacattacgacagccggcggaaaggaatacttttatctcctgtctctcacacatgtaaacggagaagagcgcacctttcactcactgagtgagctgttggaccggttttatttcggcaaggcggaacgcgaccgcgtcaaacagcaggctcaggatctcgagcggtttgtcgcaaacgaacggaaaaagaacgccaataagataaaaaagctggaaaagacgctcgactactcagagaatgcgaaggaattccagctatacggcgaactgctgacggcaaatttgtatatgctgaaaaaaggtgacaaagaagcggaagtcatcaattattatgatgaagaaagtaagacggtgaccatccctttaaatccgaacaaaacaccgtcagaaaacgcgcagatgtattttacaaagtatcaaaaggcgaagaattccgtcgaggtggtaaaagaacagatccgtctggccgaggaggaaatcgcttatttcgatcagctgatccagcagctctcctccgcctccacaaaggatattcacgaaataagggaagagcttgtggaaggcaaatatctgcgaccgaaacagcagcgaggacagaaaaaacagaagcagcacgttcctgttttggagcaatatgaatcttcacggggattgacgattcttgtcggcaaaaacaataaacaaaatgaatacttaacgacaaaagctgccgcaagggatgatttatggttccacacgaaagacattccgggttcccacgttgtgattaaaagcagcgatccagatgaacaatccatactggaggcggctgcgatcgccgcttatttttccaaagcgaaagattccggctccgttcccgttgattatacaaaaatcagacacgtgaaaaagccaaacggcgcaaagcccggatttgtcacctatgacagccagcataccgtatttgtcacacctgatgccgaccttgtcatacggctgaaaaaataaacgcacctccaagctgaaacccgcactcagcttggaggtgttttttattacgtataaacggagatgaaactctcccagccgtcagaaccgatctatacagtatctgatcagtttcccgtcatgtctgcctgatccgccgggggccgtctctgattaaagcggtcacacctgatttggcggcggatactgtcaccttccctcgccgcacctgagcacatccgggcagtcaatataatcatgccggggtctctgaccgttcctttgtatgcgggcggagtccaggcggcatggggagggactgacaaggtgttttttatggtcttcttcttttctcaaataatcgatccacttcttcagccaaatcagcagtaatgagaggctttatgtcctcagccagtcttttcgtatgtgcagggcttgcgccgcttgttgatacggatacttgaatgcgccctttgcggatgatcttcggcatatacacgctgccccgttcagcctcgcttacacaattgaccagctgcgtttcagaagcgccctcggctatctcccgattcacgctgcggtcatttgtcgcggcaatgatgaaaaaagcgggcgcaagatccttcatttcaattttacgggaaacccagcggatacgtccttcatccgccagctgtttaatttcaggcagggcatcgggactgattacagtaatatccgcgccttccggaagcactgttttgagtcttcttaaggcaacattgcctccgcccgcgatgacaattctttttccgctgagattaatgtgcagaggcagcatactgtccccccttaaaatcaaactgcccgccggggtttcggacagcttccgtcacacggttcaaaaacgcctgcttaatatgcgggtgaaaacctaagtatgaagcgagatgaacattttgattgaccgtttgaagcttttgaacttcccgttcaatctcagtcattaaaagcccggtaaacagaagatatggaacgataaaaacgggtgctccgtcatcctcttcaaggccggcaaacacttctttatagtgcgggtcacatgctgttaaaaaacaagggatgacttctttaacaggtgtaatcgcctcaagttttccggcaatctcactgactgcgtttttaactgccggatctgtgcttcctcttccgatcagcaccactttcgcctgctcaatgggcactccggtatcttcaatgcgatgatgcaccgcttttacgacttcatcgtccactccgatcggaacaccatatgtcacttttatatcgggatgaagggccgccgcacgggcgatttcagccggaatgtcatgttttgcgtgggcagcggtcaacagcagtaaaggcacggccgcaatatgagtggcgccttgtctgacacatgcttcaaatcccgcttcaatagacggttcctgcagttctaaaaaacaaatttcctgaatgggagcgtcagcgtgcggcatgcacccttttaaaaacgccgccgactctgtctgcgcttttttcagcctgcttccgtgcccgatgtataaaatcgcctgcttcatttacaacgcctcgctcaaatccagatttttctgatcagatgcataccagtccagtttgcagtgataattgacgacatcgccgataacaattaagctcgggtttttgatttcttcttttatcactgtgtctgaaagcgtgccgacggtgcagacgactgttttttgcctgtccgtcgttccccaatgaataaaggctgccggggtgccggcgtctctgccgttttccagcagcattctttcaatctgccggatatttttaattcccatataaatcaccagcgtatcaatgcccgtcgccagcgctttccatttttcttcaaagtcgtcttcttgtttataatgtcccgtaacgaatgcgacattggagctcgcctctctgtgcgtcacgggaatgccggcataagcagcagccgcgattcctgatgtaatgccgggaacgatctcaaacggaatggcgttttttgcgagagcctccgcttcttcgcctccgcggccgaaaacaaacgggtcgcctcccttgagccttacaacggttttcccctttttcgcatacttcacaaggaaacggttgatcgtatcctgtttcataatgtgaaaatccgggagctttccgcagtaaatcagatccgcttcttctccggcatattgtaaaatctctttgcttaccaatctgtcatataatataacatccgctttctgtatggctttcattgccttcaccgttaataagtccggatctcccggaccggctccaacgataaatactttccccatagcatgtctccccgatccgttttgaaatcttcccagaacagccgcgaggccgcacttcagctattttaccatatcccgccattgcgggggatatccggctgattgcgcggcctttttggacctattatgctaagctgtttttcacaaagtcaaccagtcttccggtgcattcttcgcgttcacatttgcctgaatcaagtacgagctcaggcgctttcggctcttcatacggtgagtcgatccccgtaaagaacggaatttcaccatttcttgcttttttatataaacctttcggatcgcgcttttcacatatatcgaggtcgcatttcacatagatttcattaaattcgccctccgccacaagctctctcacctgatctctgtcctcacggaacggagaaataaaagccgtgatgacgatggttccctgctgaacgaaaagcttcgccacttccccgatgcggcgtatattttcctttcggtcatcatcggaaaaacctaagtccttgtttaagccgtggcggatgttatcaccatcaagcacgatgacttgatagccttgttcaaacagctcgcgcgctgcggcgtttgcaatcgtggatttccctgaaccgcttaagcccgtcagccagaggatagagcttttatgcttgtttttctgctggtattcttctttcgttattgaggcttcatgccacacgatatcacgatttgtcattctattttcctccttaagaaacgcctgcttcttctttcgttttcagccctttaatcaacacctcgacaacttcaggacggctgaattccgccggcggcatgacgccgcttcgcagcatttctctgacctttgttcctgacagaatgacgtggtcttctctgtcatgcgggcatgttttggccgttcccatgttgccgcatttctggcagaagaagctgtgctcgaatttcatcggtgtaatcccgagttcatccgctgtaaattgatcaaacagctcttgcgcttcatatgtgccgtagtaatcaccgacgccggcatgatcgcggccgacgataaaatgcgtgcagccgtagtttttgcggacaagcgcgtggaaaatggcttctctcggccccgcataccgcatagccgccaaaaatacgccgaggaacacgcggtctttcggataataatgatcgagcagcacctggtagctttccattctgacatccgccggaatgtcatctgattttgtttcaccgacgagcgggttcaaaaacaggccgtcaaccgtctcaagcgcggttttttggatatattcgtgggcgcggtgaaccggatttctcgtttggaaaccgacgatggttttccagcccttttcttcgaagcttcgtcttgtatcagcaggttcaaatgtaaactcgggaaactgctttgacgcttttttaactaatgtgatcggcccgccgacatacgtatcgccgcgtgaaaataattttttcacgcccggatgcgcggcatcatcggttttatatacgtgaacggcttctttttgtttatccggcgtataaatatcttcgatgtcgactacgccgtatgtttctccgccgtaagtcagtttcaccgtgtcgccgacggcaagctcagccgctttttctgaatcgaccggaagcgtgatcggcagggaccagacaaccccggatgccagacgcatattttcaacgactgacacgtaatctttttctgtgaaaaatccttcaatcgggctgtaccccccgatcccgatcagctctaaatcagcgaacgaaatcaaatcaagctcaatttctttttggacggatgtaagatcatactgctcatttacccgattaattaatgttcctccgtgcggtgctaaactcataatacatgattcctcccagttaacagataaataaactcagattaatagttaaatgcctccgccttgttcatggacagagcgtttctcttttcggatggctttcatcagactggcggctccgccagctgccaaaagcacgctggccatcataaagatggaatagtaatctccttttaacagcagggagacaagcaaatacgaaatcgacagtgacaaaaacggcgaaacgacccatactttgagcatcgttttcacgacttctttatgaaaaacgttcggcccgtttttggccattccgataccgataattgatgatgatgtgacttgcgccaatgggaccggcagaccgaagacggaactgataatgacaagccccgcgccggttcctgaaagcagtatgccttctccggctgaaaatctcgtaatctttttcccgttggtttcaagcactttacgtcctaaaagcagagcgccgagagcgacaaagatgcctccgtacagcgttcctttggacacgctgagcacgcccgcagcaaccaaagggcccaccgcatttgcgacattgttcattccggctgaaaaagcttcccaaaaccccgcaatcagcagcacaatccccaaaatcttctgtttccgattcgaaatgactcgaatattcagagaactgaataccttcgagacgagaaacgtgaaacagaacgcgacgaacggtacgagcacccaaaaactcacgatgactaaaagatgctgtaaaaacaatactttgtacgcgacgccgacaccgacaatcgccccgacagtgacctcactcgtcgacagcggaatgccgagcacattcgccgtgaataatgatagcgccgccgatccgataataatgcagacaatggtgagcgtaatggtttgttcgggaatgattccgccgctgatcgtcttaacgacttctccgccgccgataaccgcccctgacaggactccggccgcgcagatgatcagcgcatgcgttttctttttaactgcgccggacccgtaagcgactcccattgaagccgcggctccgctggctccgatattcatggcaaaaaacaggcagaataaaatagcggctaattccatcgtgcagctcctttattcatgcagtccgcattctgttttcgccatgccgttccatctgccgctccgcaaatcttccgcggtaaacgcaggtgaagtgcacggttcacagccgatgctcggatacccctgatcgtggaggatattgtaatccagctcatgcttggaagtatatctccagatgtctttccatgtccaatggatcagcgggcatactttaatcgattgaaacttgtcgtctttattcaggaaattcgtattcgcccggctcggcccttgatcccggcgaaggccggacagccatgccggatgccctgcgagcgcttctcttaacggcagaatttttctgatgtagcagcactggttcggttctctttcccacagtttatctccgtgagcctcggcctgttcttcaagagtaaggctgggctttttcaggataatgttcagtcccgggtaacgctctttcactttttcgatcgtttcatatgtttctttaaagtgaagacccgtgtcgagaaacacgatttccgcgtctttctttactttagaaattaaatcgatcaggacgatgccctcaatcccgaagctgcacgcgtaaacaagctggtctccgtagtggccgtatgcccattttaaaacggacagcgcgcctttataggaatcgtcttccggaaatgtaatcgccggctcttcccatgtgtcatacgttagcatttttcctttcctcctcccggagacaatcaaacagctgttgttttctgccggttgtcttatccctcaatctttttttcatataaaaaactttcaatccagcggaatgaaagacagtgacccggtatagcccttatcttcaaaatgctgtgcatttttctggatgcggcaccttgcatgacacgcaggttgccgggcgtcatcggtccagtccctcagccgctcttgataagctttttagatttgtactaaattttagcacaattctaacagaagtcaacccgagttttttgataggaataataaaacaggccctgaggcctgtttttattgtcattattttttaaaccaatcttttgactcgggattctgtttccatgatttcagtttctcaacgtcatctgaatgaatcgttccgttttcaagcgcgacttcaatcagcgtgtcataatccgttaacgagtaataaggaagacccgcttttttaaaggcttcttttgctttcggcagtccgtatgtaaaaatggaaatgacgccgaggacttccgcgccctctctttgaagggccgccgcagcttcaagcacgctgcctccggtagaaatcaagtcttcaatcacgactgttttttgtcctttcttaatggcgccttctatttgatttcctttgccgtgcgctttcggtttgcttctgacgtagcacatcggcgcgcctgtacggtctgcgagaagcgcagcatgcggaatgcccgccgttgcagtgcccgcgatcatctccgcctcgggaaaatgctctttcagcagtttgccaagcccgtccgccacatcatttctcacttttggatacgacaatgtcagacggttgtcacaatagatcggtgataaaatgccgctcgcccacgtaaacggctcattcgggcgtaaaaagacagcttcaatgtgtaatagatgttttgcgatagcctgtttcatcggcgaacgccctcccattccagtttaattgcttcatatgcttcaacggggttttccgcttttgtaattgagcggcccacaacgatggctgacgaaccgttttctttcgcaaatgacggagtcgccgtccggacttgatcgtcagctgtgtcactggccgtgcggatgcccggtgtgactgtcagaaatgaaggccggaccgcttcataaatggcttttgtttcatgtaccgaacataccactccgtccagcccgcactcttccgccattttgccgtaatgcacaaccgtttctaacagcggcttatgcagcagaagctcttccttcgccacctgctctgaagtgctggtcagctgagtcaccgcgattaaagacgggcgttttctgcctgccggcgtgccttcttcaagcccctcaagggccgcgcgcatcatgcgtgcgccccctgctgcatgcacattgacaagatcaacgccgaggccggccagccgcttcatcgctttattgaccgtagtcgggatatcatgaagctttaaatctaaaaatatatcacagttccgttcttttaattggtgaatgatggcggggccttcctgataaaaaagttccatccccgttttgacaaaaagcctttccttttcaaacaagtctaaaaacgttaaagtctcttcccctgatgcaaaatcaagcgcgatgatgggcaggttgtttttcatgtttccagctccttccgatgcattcacttacagattgaaagccgtgttggcgcagcacacgggggagctgttctatgatttccgggcagacgaacggattgacgaagtttgccgtgccgacggcaaccgcactcgctcccgcaagaagaaattctaatgcatcctctgcggtctgaacgccgcccatcccgataatcgggatttgaacggcctggctgacttcgtataccatccggatggcgaccggtttgatcgccgggcctgacagtccgcccgttttatttgctaagatcggccgtcccgtcttgagatcgagcctcatcccgatgagtgtattaatcatcgtcagaccgtcagcaccggccgcttcaatcgccttggcaatttcggttatgtttgcgacattaggcgaaagcttcacatacacaggcactgcggaaacttctttcaccgcttttgtcagttcggccgccatgacgggatcagtaccaaaagcaatcccccccgttttgacattcggacatgaaatgttaagctcaagcgcatgcacattcggcgcttggctgatgtgctcggccacttctttatagtcgtccacctgagaaccggcgacatttgcgataatcggcgtgtcaaattgttcgagccaaggcagctcatgattgagcacatgctcgaggccgggattttgcagaccgatggcattcagcattcccgcgcttgtctccgccactctcggcgtcggatttccgaagcgggcttcgttcgtcgttgctttaatcataatgcctccgaggcatgataaatcgtaaaatccggcatattctttcccgaaaccgaaacatccggaagcggggatgatcggatttttcaattggagacccggcagattcacctctaacattacagcgccacctcctcagctttaaataccggcccgtcaaggcagacctttacataggatgtatcgctttcacccgtgcggcacacgcaggcgaagcaggctccgatgccgcagcccatccgctcttccatcgaaagataaacctctttatggccgtactgctgcttcagagctttcagcatcggtgtcggtccgcagcttagcaggacatcgaattcgagctgcttttcacggatgacatcggtgacaaaccctttctctccatatgttccgtcagccgtcgccacataggtgtctccgtacgcacgacattcctgttcgtaaaaaacatcctttgctgattgaaatccaagcacatgaatgacgtttacgcctttttccgtcaggcgctttgacagttcctgcaaaggcggaacccccactccgcctccgactaacagcgcggttttgccgggttcaatccgccggatggggaatccgttgccgagagggccgagaacgtctatcctgccgccctcttttttctcggacaaaagacgcgttccctcaccgtcagctctgtagataacggatacttcatccgcggcgaaatcgacgtccgcaatgctgagcggtcttcttaatagcggcgtgaccgcgtcactcaccttcagatgtagaaattgacccggctcggtaaggtgccggacaagctctcctttcagcaccatcttataaatccggtcggcaatttctaagttggattgaacagtcaaatgcactttcttcatatcgtgactgccgccttttgattggtttcggatgcaggcatatgatccgcccggaatgtcatgctttccagtacccgcaaaatggcttcggccgtatctaaagatgtcaggcaggcgactccgttctcaacggattcgcggcggattctgaagccgtctctggccggctgtttgccctttgtcagcgtattgatgacaaattgcgcttcgccgtttctgatcacatcgagcagatttttcccttcttcgccgatttttccgacgacttgagccggaatctgagcgtcttttaaataagccgccgttccttccgtcgccaagattttatagccgatggcgtggaaccgcttcgcgatcagcagtccttcttctttatctttatcggcaacagtcaacagcactgagccgtagttcgggatttgaatgccagaagcaatcagcgctttatagagcgctttttccagggttgaatctttgcccatgacctctcccgtcgacttcatttcagggcctaacgtaatatccactcttctcagcttcgcgaatgagaagacaggcgctttcacgaataccccctgctgttcaggctgcagcccctcttgatagccgaaatcagcaagcttttggccgagaatgacctttgtcgccagattcgccatcggaatctttgtgattttgcttaagaacggcacggttctgcttgaccgcggatttacctcaagcacatacacttcaccttgcgacagtacgaactggatgttcagcaacccgatgatgttaaggccttttgccaaggctacagtgtattgttcgatttttttcttaatgtcttcgcttaaagactgaggcggatagacggcgattgaatcccctgaatggacgccggcccgctcgatatgctccataattcccggaataacgactgtttcgccgtcagatacggcatcgacttcgatttctttccccgtcagataacggtcgattaacaccggatgctgcgggttgattttgaccgcatttttcatatagtgaagcagctcttcttcgtgatagacgatttccatcgcccggccgccgagcacatacgaagggcggacaagtaccggatagccgatggatgcggcaattttgaccgcttcgttcaccgacacagcggtttttccgagcggctgcggcacattcagcgcctcaagcgcctgctcaaacttatcccggtcttccgcacggtctaaatcttcaagtgatgtgccgaggattttgacgccgcgggcgctcaattcttccgcaagattgatcgccgtctggccgccgaattggacgacaacgccttccggctgctccaaatcgatgatgtgcatgacatcttctaccgtcagcggttcaaaatacagtttgtctgatatgctgaaatcagtggacaccgtctcaggattgttgttgataataatcgcttcatagcctgcctgcttgatcgcccagacagaatgaacggtcgcatagtcaaattcgacgccctgtccgatacggatcggcccggaaccgaggacgacgacgctttttcttgaagtaatctcagactcattttcttcctcatatgtgctgtaaaagtacggggtttctgattcaaattccgccgcgcatgtatccaccattttatatacaggcttgatgtctgcttcttttcgcatttgatacagctcttgttccggcatgttccattcccggctgatatatttgtcggagaaaccgagttccttcgctgtctgcaggacggtaaggctgcctttttccgctttcagctctgtttcaaaagcgaccagcttacagagcttgtgcaaaaagaatacgtcaattgcagaaaactcatgaagctgctcgactgtgtagcctcttctgaacgcttcagcaagataaaacagccgttcatctccggcctttctgatccgtttttccaaaagcccgtcagaaatctcttccgcatccttcagttccaggtgatagacatcggcttccagtgagcggaccgcctttaacagcgattcttcaagggtgcgtccgatggccatgacctctccggtggctttcatttgcgtcccgagcctgcggtttgccgactcaaatttgtcgaacggccagcgcgggattttagaaacgacatagtcaagcgcgggctcaaaagccgcatatgtttttcccgttacgggattcatcatttcatcaagagaaagcccgactgcgattttcgccgcaagctttgcgatcgggtaacccgtcgcttttgaggcaagggcagatgagcggctcacccgcggattcacttcgataatgtaatattggaagctgtcgggatcgagcgcgagctgaacattacagccgccttcaatgccgagcgcgcggatcagctttaatgaaacattgcgcaaaagctggtattcccggtcgctcaaagtctggctcggggcaacgacgatgctgtcgcccgtatggatgccgaccggatcgatattttccatgttgcagacgacgatcgcgtgatctctgctgtctctcatgacttcatattcgatctctttgtaaccggcaatgcttttttcaagaaggcactgatggacggggctgagttttaatccgttttcgacgatctctttcagttctgcttcattcgagcagatgccgccgcccgttccgcctaatgtgtaagcggggcgcacgataaccggaaacccgatccggccgacaaattcctcggcttcctgtaaagtgcggatgatctcactttccggcaccggttcattcagctcattcatcagcgtacggaataagtcgcggtcttccgcctgctggatggcggacagctttgtcccgagcacttccactccgcattcctcaagaaccccgagttcagacagctcgacggcaagattcagtccggtctgtcctcccagagtcggcaggatggcgtccggccgttcttttctgataatacgcgtgagaaactccggcgtcagcggctctatgtatacccgatcagccatttccgtatccgtcataatcgttgccggattcgagttgacgagaatgacttcatagccttcttccttcaaagcgagacacgcctgtgtgcccgcataatcaaattccgccgcctgtccgataataatcgggcctgatccgatcactaaaatctttttaatatctacgcgttttggcataccgcttccccttctttctcagttgtttcgatcaagtcaatgaatctgtcaaataaatgattggcgtcttccggccccggtgaagcttcagggtggtactgaaccgtaaatgccggcaatgttttatgcttgagtccttcgatcgtttgatcattgatcgcaatgtgcgtcacttcaagctctgtctcatctattgaagaaactgtatatccgtggttttgggcggttaaagcgactttccctgtcgcaagctctttaaccggatgattggaacccctgtgtccgaatttcattttttccgtttccgctccggatgccagtgcaaataattggtggccgaggcagattccgaataacggcaccttcccgagtatgccttttatcatttcaatggcttccggtacatctttcggatctccgggtccgttagaaagcatgatgccgtccggcttgagctgaagcacttcttccgccgttacattgtacggcacaacgatgacatcgcattttcttttgtttaactctcttaaaatgccgtgcttcataccgaaatcgacgagtacgatgcgtttgccgcggcccggactcggatatgccgttttcgcagatacttgagcgacttgatttctcggcagttccgtttctttcagccttgcaagaacctctccgacattctcctcacttgaagcaaacgttccctttaatgcgccggccgtgcggatcattcttgtgagctttctcgtgtcaatcccttgtaagccgggaatatttttcattttcaaatactcgtcaagcgtgtaagccgaacgccagttggaaggcagctcgcacagttcttttacgatcagcccttttacaaaaggagtgatggattcaaagtcatctctgttaattccgtagttgccgatcagaggatacgtcagcgtcacgatctgcccgcagtaagaagggtctgataaaatttcctgataaccggtcattcccgtgttgaatacgacttcacccgcggtatgctccaggctcccgaatgcttcaccctcaaataccgctccattttccagcactagtcttcttttcatttgacgagtctcccttcttcgtatgcaagcttaccggcagccatcgttgcaacaggccagccgaagcacttcatcttgttgaatggcgtattttttcctttagataaaaatgtatctttgtcaatggctgcttctttttccagatcaatcagggtgatgtcagccggcgcccccggtgcaagcgttccgtacggaagatcaaatgcctcgcaaggttttgacgtcatgaaatcaaccagctgcttcagcgtccacgccccgtttttcacaaaatgtgtgtacagaagcggaaaggctgtttctaaaccgacgataccgaaaggcgcaagcttcatatccgtgtttttctcttcttttgtatgcggcgcatggtcagtggcgatgaaatcaatcgtaccgtctaaaagcccttcaatcagcgcctctctgtcctctttgctgcgaagcggcggattcattttaaaattggtatcaagtcccgggatatcttcgtcacaaagcagcaggtggtgcggcgatacttccgccgtcacgcggattcccgctttttttgcgtctcttacggctctgacggattctttcgtgctgatatgacacacgtggtaatggcagcccgccgcttccgccagcaggacgtcacgggcgatatgtaccgcttcacaaatggaaggtatgccgttcaggccgttcgcttttgaaaaagaaccttcatgcacactccctccgtaaataagtgagttatcctcacaatgagcgacaatcgctttattcattgaagccgcccgtttcatggcttcatacatcattccagccgtctgaacgccgacgccgtcatcggtgaaggcgaatgcgcccgcttcatgaagcgcctcaaaatctgtcatttcttcgccggtttgtctgatcgtaatggatgcgtaaggaagaaccctgacagatgaggtttctttgatccggtttttcagccattccatctgctctttcgtatccggcaccggtcttgtattcggcatggctgcgactgtggtaaagccgccccgcgccgcggctttagagcccgtctcaatggtttcttttttctcgccgcccggttctctgaagtggacatgaaggtctacgagtcccggtgaaacgaacagtccgtcagcgtcgatcaccgtttctccgtctttcgctgtcagaagcccggtttccgaaatgaattcacccgttacccggatatcctgtgccactttttctccctgttcatttaacatccagccgtttttaatgagataagacataagccgcttctcccctttttacattggtttgcagtgctctttttaagactgccattctgatatacacgccattttccatttgtttaaagattcttgattttccgcattccactaatgttgtgtcaatttcgactcctctgttcaccggtgcgggatgcatgatgatggcatgccgcttcatgctctccgcccgctttgcggtcagcccgtatgcttccaggtagcctttttggtcggcttctgtctgatgcctttcattttggatgcggagcagcatgacgacatctgaagcttgtatggcttcatccgtctgtacacaggtgccgaaggcgtttttctcatcctgccattgcggcggccctgaaaacagcacgcgtgcgccgagccttgtcagcacctcggcatttgaccttgccaccctgctgtgtttgatatcgccatgaatggaaaccgtcaggccctgaaaggtctcaaattcctcttgaatcgtcattaaatcgagtaatgactgagtcgggtgctggccgcagccgtcgccggcgtttaagatcggaatattgactctgccggtcagatctttgtaatattcatccgtgctgtgcctgatgacgcaggcgtccgctccgattgattcgagagttttgaccgtatcgtataaggactcgcctttttgaacgcttgtgctcgtgccgtctaagctgagcacgttcatcccgagtttcttttccgccacttcaaagctgaaccgcgttctcgtgctcggttcaaaaaacagattcgcaacaaattttcccgcgagttcggggcggactgttccctcttttatcgcttttgcctcacgcagcagttctgtaatttcagccgcgctcagttcagacatcgccgttaaatgattcatgtttttctcctccgtttccgcttgaaggccgtaaaaaaacaccccggtctatagactcggggtgcggttaaagagagaagcagcgtacagcttcttcccgttataacccttccaagcctctctggactttctttaaaaggttttacatatgattttgtttttctgatgcaatcgcgtcttcttcatttgcatgcggcaggataaggttcaggatgactccgacgattgccgcaagcgccatgccggatatttggaatccgccttttgatacttgaataaaagcccctccgacgccgatcacgaggatgacggatgtgataatcaaatttctcttgttttcataatcaatgttgttgtcaatcagcattcttaagccgctggaggcgataattccgaagagcaggaaggaaacgcctcccataaccgcggacggaacagagctgatcagcgccgaaacttttccgataaatccgaagcacagcgcaatcactcccgcgccgccgatgacaaagacgctgaaaactctcgtaattgccagtacaccgatgttttcgccatatgttgtcgtgggcgggccgccgattaacgaagcaatgatcgtcgcaacactgtcccccattatggagcggtgcagtcccggctttttaatgaaatcctgtccgacgactttactcagcaccatttgatggccgatatgttctgacatcgtcacgaaagcgaccggcaccatcgcagccgcaatgcccaatgtcactgacggcgtatagtctttgaaagggatgataaattcaggaacggcgaaccactttgcatcaatgaccggctgaaaattgacgatgccctgtgtcagcgcaaacagatagccgcctataatgccgatcaataccggaatcaggcttaaaaatccccgtaaaaagatggcgcagataatggtgatggccaaagtgacgccggctacactgaaatgtttcaagctgtagacgagttccttcgcattcggatcggcatacattgccatattgacggctgtgcttgccagtccgaggccgatgacgatgatgaccggcccaacgacgaccgggggcagcagcttcatcagccaccccgttccaagctgcctgatgagcaatgcgatcaggccgtacacaattcccgccaggaaagcgccgaccatggcagcccccggccctcccgtcgccttcaccaagataatcggtgatataaaggcgaatgatgagccgagataagcgggaatctggccttttgtcaccaagagataggcgagtgtcccgattccgctcgtgacaagcgccactgccggactcattccgaccagtttcggcacgagtatggttgaaccgaacatggcgaataaatgctgcaggctgaatgacagccaagacaatggattggggacgtccctgactcccaggtttacttttttcttactcatggcgttttcctcccggttgactttcaaatggtataaaaaaacctctttgctttttgcgcaaagaggcatacaaaacccggccgcgtcgatccgcccggctttgtgttttaaaatcctctttgcaaactctctggaatgcatttaaaaagggtgattatttattttcgtaaatggcgaccatatcagtctgatcaacttcgctcagctgaaccatcactttttcagcttttgaggtcggaatgtttttcccgatatagtccgctctgatcggcagctcccggtgccctctgtcgacaagcacggcaagctgtatcgatgacggccgtccgacatcaacgagggcatccatcgccgctctcaccgtccggccggtataaagcacatcatcaaccacaatgaccttttggtctgtaatatcggccggaatgtccgcgccttttacaagcggctcttcattgctcgtttttttcgtgaggtcgtcacggtaaagggtgatatcgatttccccgacggtgaccggattcccttcaatctgttcgatccgctcggccagccgcttcgctaaataaatgcctcttgttttaatccctacaagaatgcagtcattcattcctttattccgttcgatcatttcatgggctatccttgtcagcgcccgcctgatcgcctgttcgtcgagaataacagctttttgattcactcgtgacacctctccattcgtatataagaagaaaaaacccctcctgccagagcatagaggggttcctttccaggacgaagacacatgcgtatctcttctgtcctatccgttatccttctcagcctctctggactgtgttaaagaatctattcagcttgtttttattatttcagaaaagaaagtcgctgtcaatggctatttcttaaatcttcaatgagttttttcatatcttcaggaaggggcgcctcaaactcaatgtattcgcccgtccgcggatgatcaaaacctaatattccggcatgaagcgcctgaccattgaaatcaatggtttttctcggtccgtacttcgggtcgcctgccaaaggaaacccgatatatttcatatgaacacggatctgatgcgttcttccggtctcaagccggcactctacgagcgtgaactcttgaaaacgctcaagcacgtggaagtgcgtgacggcgtttttgctgctttctcttgttacggtcatgctttgacggtcttttttatctctcccgatcggagcgtcaatcgttccgtcatcatgtgaaatcaccccgtggacaaccgctgtgtactttctggtcacggttttattgacgagctgattaacgagtgattcatgcgccatatcgtttttagcgaccattaacagaccggaagtatctttatcaatccggtggacgattcccggacgcatgacgccgttaatgccggaaaggtcgttgcagtgagccatcagtccgtttacaagcgtccctgtcacatggccgggcgccgggtgtacaaccatgccccgcggtttgttcacaaccaagacgtcctgatcctcatagtaaatgtccaaatccatcggttctgcaagcacgtccaattcttccggttcaggaatggtgacgtttacctgatcgccgggctgcattttataattcgcttttacggatttgccgttaacggataccagtccctcttttacccattgctgcacttgagtgcgtgaccagttttctcccgttgaagccaaaaatttatcaatccgttcgctcttttgttcaggctgaacggttatctcaaattgattcatgttattgctccttctttttcccgctgtcaaacagcatatgaataaataaaagtattacaccgacgcacagtgaggagtccgcgatattaaaaatcggatagtgataatccacgatgatgacatgaataaaatccaccacttcctggcgcgccgcccggtcaataaagtttccggccgcaccgcccagcattaagccgagagaacttccgagtaacatctgcccttttgcataacgctgtatgtaataaacgattccgataatcacggcgatggtaatgacgtagaaaaaccacatttggccggctaaaatcccccacgccgctcccgtgttgcgatgagatgtgatataaagcacctggtcgatgacaggtatgctttgtcccaattccatatggctgacgacaagccatttggtcaattggtcggcaataataataaaaagagcgataagataataaagcacacacgttcctccagtatacagttacttttatcctttatgaattttatcagtaaaaggtgccagagtaaaggcagatcataagcgcatgcaaacagacgctgtcactcatacagcgcctgatcatatgcataatctccgggttcccaatatggaagggttttcttttcaaattgagcgggataatagaaatcatcagcggttctggccgtcggcagcaccgcaagtttttcaatcggaatggggtcgcctgttttttcacaataaccgtacgtattgttttcaaacttagacagggcaagaagaacgtcctgaagttcttcttttatatgatagatcagagttgcttcttggtcgttcattgaaggttcaacagatgctgacatttgaaagcaagaatattcgaataatcttgattgaagttcttctttcatcatgagaagctccgtgtggattgcggtcagttgatcattcattcatcacaactcctgctcttgatgttatagctttattgttgcccccagggcgccatttgaagcccataagatttttcctgtcgttctaatcgatgacattagtggcatgtaaaaaaagcgcccggctgtcaccgggcgctttctcattcattatttttgataatatttttcaacgatttccgcattgcgcagtgataatgtcggatattttggattggctccgacatctttagaaattacgcgggaacgttcacacatctggccttccgctttttctacggtcatttttcctgttgtgaagctttgcgcgttttcaggcgcttcactttcgtcttttactgtcagttctgagacgataaacagctgcgcgatattttctttaatggatgacaagaggtcgcggttttctttgttcggatacaaagtcaggctcgcttccaatgatcttccgataattttttcgttacgggctgtttccaaagctttcagcacgtcgtttcgaagctccatgaagcggtcgaacttttcttctgtcgcttgactgtccggaacagcaatggtttccggcatatctgtcagctgcacgctcgcttcttcaacaaatgataagtgagaccacatttcatccgccgtatgcgggagaatcggcgccgtcagcttcactaacgccagcagcgtttcatagaagacggtctgcatgctgcggcggtccggatgatccgcatgctcgatgtacacaacatcttttgcaaaatcaagatagaaagagctgagctcgatcgtacagaaattgtgaatgctgtgataaacaaccgcaaattcatattcatcgtacgcttttttcaccttatcgatcagcttattcagcttgatcagcatatattgatccacttcgcggagatcttttacatcaacggcattgacacttggattgaaatcgaacaggttgccgtgaaggaagcggaacgtgttgcggactttccggtatacttccgcgacctgcttcagaatggcgtcagacacgcgaacgtccgcctgataatccactgacgatacccataatcttaagatgtcggcaccaagctgtttcatgactttagccggaacaacaacgttaccgattgatttactcatcttgcgtccttctccatccagtgcgaacccatggctgagcacacctttatacggcgcttttcctgttacggctactgctgtagaaagagaagagttaaaccagccgcgatattggtcagatccctctaggtataaatcagccgggcgaacgaggtcatcacgttcttcaagcactgcttgatgtgaagagcctgaatcaaaccaaacatccatgatatcctgttcttttgtaaatgtgccgttcgggctgccaggatgcgtaaagccttccggaagaagatcctttgcttctttttcaaaccaaatgtttgatccgtgctgtctgaacaattcagaaacatgttcaatggtttcatctgtaataatcggttctccgttttcagcgtaaaataccggaatcggcacaccccacgcacgctgtctggaaatacaccagtctccgcggtcccgaaccatgttgtgcaaacgctgctcaccccattcaggaacccatttggtttctttaatggcatccagcaggtctgatctgaaatctttaatagacgcaaaccattgcgctgtcgctctgaaaatggttggtttttttgttctccaatcatgcggataagagtgagtaatgaattcaagcttcacaagtgcgcctttttcatcgagctgctgtgtgatcgctttgtttgcatcatcatagaacatgccttcaaacccaggagcttcgcttgtcattacacctttttcatcgaccgggcaaagcacatctaaaccgtatttttggccaatgataaagtcatcttccccatgtcctggcgctgtatgaacacagcctgttccggcatcagttgttacgtgttcaccaagcataacgagagagtctctgccatatagcgggtgttcagcgataatgttctcaaggtcttttcctttgaccgttcttgtcacttcatactgatcaaatccgcatgctgatgcaacactttcgactaaggcacttgctacgacaaagcggtcttcacctactgcaatcacgctgtactcaagatcagggtgcactgaaattccgaggttcgccggaattgtccaaggcgttgttgtccaaatgatgatgcgctcgccgttttcaagaacgccttttccgtcttttacaccaaaagcgacgtaaatagatgctgaacgtttgtcttgatattcgatctcggcttcagccagagcagactcacttgaaggtgaccagttaaccggtttaaggcctttgtaaatgtagcctcgttttgccatttcaccaaatacgcggatttgctgcgcttcgtattccggttttaatgtcacgtatgggttttcccagtcaccgcggacaccaagacgtttgaattgctcacgctgtccctcgatttgcttccaagcgtactcttcacatagtttgcggaaatcagcgacggacatttctttccggtttacttttttgtttttcgtcagcgccgtttcaatcggcagtccgtgcgtatcccagcccggcacgtacggtgcgttgtagccgctcattgacttatagcggacgatgaagtctttcaggattttgttcagggcatggcccatgtggatgtctccgtttgcataaggaggtccgtcatgcaatacgaatttcgggcggtctttcgtccgttcttgaacaagacggtaaatgtcctgctcctcccagtctttttgcatgtccggctcacgattcggcagatttccgcgcatcggaaaatctgttttcggcattaacagcgtatctttgtaatccattttcattcctccacaacatttttcagaaaataaaaaaagccctctcatcccataagggacgagaaagcttatctcgcggtaccacccttttagaaaaaacggatcatccgtcttttcctctcgaacatcgtaacgtgatggaacgtcctttcctactctcggttcagaaaggaaactaaagggctgatctgcatgattccggccatcccgggctttcaccttccccgggtcgctttatagcctgttttgagtcataccggtccctttcaatcgtcttttcatctgaatttatgaacgtattatattcgaacgggccggagaatgtcaagaaaatcagaaaattattctttttcctcaaataccgcgtcgacttcgtattccagcagatgatcccaatcatcgttcttcagcaggtcgagctgcgcttcaatcagcatttggaaacgtgttctgaagactttagactgttttttcagctcttcgatttccattgcgatttttcttgatttggaaagcgactcattgatgatgcgatcagcatttttttctgcttcacggacgatcagcttcgcttccttttgcgagttgcgctttacgtcttctgcggcttcctgggctacgagaattgatttattcagcgtttcttcgatattggcaaagtggccgattttttcgtccagctcgttcactttcgcctcaagctccgtttttttacggagtgcgatttcgtaatcttttctgacctgcattaaaaattcatttacttcatcttcatcatatccgcgaaaaccttttgtaaacgttttgttatggatatcattcggcgttaatggcatattgccacctccatttttacatttcagtacggttatctagttcacattataaaacaaatacggcacagatggagaaaaaaactgaaaaaacgactcatttttgccgttcaaatgtaactttccatttgtcttttttcgtttttccgtcaacttttgccaaactgcatcgtccgaagccgcgaatcgagagcatgtccccttcagcaacctgataagacggatcttcaatggctttccaattcaccttaacgagcccgtttttcacaagcgcctgcgctttctgccgggattgcctgctcattgaagcgcagacggcgtcgagacgcaatgaagaaaccgtgtcatcccttatttcgacatctgaagcgggaatgtgaagagcggaaagctcgattttctcaagctttaccggcgctttgcccgccttggtcagctgagtgctgacaaaatcggcgatttcaccggagacgatcagctgcacggcttcctctgagaaaatcagatcgccgtatttctgccgctttaagccgatccccattaatgatccgagaagagagcggtggtcaatgctgacgaatttttcagcgtattgaacgtcaaaagcccgaagctcaaaatcatcctgttcaggttccatatattcagggtataaaatcgcgcgtttgcgctcagctctgtcatatcctccgaaaaacgcaagaccgcaggcgtcgccgataacggcttttacaatgacctgttctctgggatctaagaaatcagtcagcttcatccgatactggtccaggacaatctgtttccattcaagcgcctgatcaataaaaggccgctcgtcttgtctgaagtgctggtaaatatcgctcatgttctttcctttctatgtaaagaggcttggctggtgccaagcccgtatcaaactgtcgcattcaagtatacattgcgatcatgcggtataggccccaaagtcccgtcgtggcaaaccgaagcacgataatcgctacaatcggggatatatccagcatggcaatgggcggaatgatccttctgaacggctctaaatacggttcgcaaatcgctgcgagaaaccgtccgaccgccgtttctctcgtactcggcacccatgacataaagatatagatgatcagggcaaacgagtagatgtaaattaaataactcagaacggaaaaaatttgataaagaatcatcctgctttaccacctctgatgttcgtcttcatttataagctccgaaatcgtgccggaaacgtcgacattatcaggcgtgcacagaaaaatatctgaaccgattctctgaatgtcgccgccgatggcgtagacggtaccgcttaaaaagtcgacgattcttttcgcctgatcatgctggatgcgctgcagattgacgacaaccgcccgcctgttctttaaatgatcggcgatttcctgcgcttccgcatatacacgcggttcactcaacaccactttagaggatttctgaacactttgcaagcttactacgttctgcttgccctgcggcttctgagcgtaagcaggctgtttctctttctgctgttcatgctcttccggatgatcctgctccgtttcaatgtattcgtactcgtactcctcctcatccattgagaaaaagtttttcagtttatttttcatgctcatttgtttacaccccccggttcatttccgactaatgaagagccgattctgataaaagttgcgccctcttcaacagcgatttcataatcatttgacatgcccattgacagttccctgcacggggcgtttgtctgattcagtttttgcacctgatccctcagatcacgcaattgccggaagcaggctctgatcgtttctgtatcgtctgtcaggggagccatcgtcatcaggccctctacagaaatgtttctaaactcagaaagctctctgataaaggggatgacctcctctgttttcaaaccgtgcttagacggctcaagcgaagtattcacctgcacaaaacagcgaaccgcatgctgcgcccgtttttcaatctcttttgccaatgacagtctgtctaaggaatgaatataagatacacggtcaacgacggccttcacctttctggactgaagactgccgataaagtgccactccgggctgcctttgatgacttcctgcttatggataagctcggcatcccggttttctcccagacttgtaataccggcatcaacggcctcttgagccctttcagctgatacgtattttgtaaccgcgatgacggtaacatcttcggggcttcggcccgatctgttacatgcttcgtttattctttcgtttatatgtcgtaattgatcagcaacacgcaagatcttacgcctccttcattccgataaaggacatcatgcgtcccgttttccctttgtcgcggcggtgtgaaaagaatagttcacgctctcgttcggtgcataaaccgctgactgaaatgttttcttccggaataccgcaatgtatcagaagaagacggttgacctcttttaaatcaagctgatactggcctttttccgtttcgcatatggcggattcagccgtaaaaggcagcgcccgcacttcattgatgacgcggtcgtcgactgtatagcttcccgcgctgatggacggaccgatgacagcctgaatatctgttaaacgggagccttcttcgtttacccagcgttccgtcatgatgcgtccgatttgtttgaccgtccccttccatccggcatgggcagcgccgataatggatttcaccgggtcataaaaatacaagggcacacagtccgcaaaacaaagggccaaaaaaagattcgcatctttcgtgtagagcccgtccgtcccgcggaatgcggaagaatagtctctcgccccttttcctttatccccggctgtcacgcgccggacgcggttttcatgtgtctggtcggcgaacacccaggaatccagatcagtaccgcataaggacgctatgacttcacggtttgtcacaacatcatgagcttcgtcccggacgtgcaatccggtatttaatgactcatacggaggattgctgaccccgccgtttttcgtcgtgaatccggcgatgaccttcgtgttaagctgattcacacagttccagtcttctatcatgagtgccgagggggtggtaagactaaacgggtgatatgtattcatggagatccaacctttcgacaaacattaaaaaagcgtaatttcccactcattttaacacaattttaagcatacgtttagcggctgattgaaaaatgagataaataaatgtgccggaaacattgagatttccggctttttacaagtaaagggaggattacgctcccccctttggttcgtttacacgcactaagatgacatcttccccaattttaactatatttcgccaaggaatgatcatttcctcttcttttccgaaaaaaccgagaacttttccgctgccgcctaaaataatcgcctgaatttttcccgttgtcacgttaatatcaatatcaccgatgcttccgagtttttttccgttcgacacgtttaccacatcttttatttgaaattcagatatgctgatcatccgtatcacgccctttgcccgttctttttcctattatatgaacggcctggctgaaccttgtcacctcgggcaatcttttttgcggctgcaccagccgaggataaatctcagcataattttcgtatagtccataagctcatcaacggacacttcctcgtttacggagtgggcgttttttaaatcgccgggaccgtatatgacgctcggaatcccggcatgataaagccaccctccgtcagttacggtttgggaaacatcaatgacgggctgcagtttttttatggctgagtgtgatgcagccaagacagaaactgccggatggtccgggtcgatttccagcgccgggaacacctctcctctgtcttcaatcatcgaagagatccgccccatttgaacaccggcctgttttctttgagccacagatcactgtcagcgacacgattaatatagtcttcgatttctgcggctgcttgttcgtgcgtttcgttcggataaaagtggacggtgatccataaccggcattcatcggcgacaaacgctgcgtgtcttccgccttcaatgacggcggggttgatcgtattggtgccgggcgcaaagccgggatagcttttcgttaccgcccagtggcgctccagctctcccaaggcagcaatgattttcgccattttttcgatggcgctcgctccgaatgtgcctccgcctgcatgaatcatattgcgcctcatgccgtcatgaaatgtttgtttgcttttcaattctatccagccggtgatgacaccgccctgcccttgaatatgcaggctgctcgtatccgcgacaaccgcaaaatccgcgtgatagccgcgtttgcagcattccagcgtccccgcctcaccgacttcttctccgattacagactgttcaatgaggtcgcccggaagctcaatgccggcatcatggatcagcttcagagagaaaagaacacacgccaaaccccctttcatatcagctgcgccccttccgatcagcatgccgtcttttacgagcggctgaaaaggatcagagtgccagtattcgcccccggcttctgccacatcaatgtgtccgtttaaaatcaggctttgatgcctgcttgaatctgtcccttttaaaacaccgactacattcgggtcttccggatacacatcccacatatcgaccgagcagcccgtttcttttaaaaagccggccacccacttttgggcttctgccgtatttcttgctggcggggccggagtgggaaaggctatcagtctttcagcaatatgtatgaagtcgtgccgccgtttctccgcctggtgtaacagcatatcaatctgatgcattggaaatctcccctttggctgtatcaaaaaacccgttcattcatgaaatgaaacgggtaaaaaacggatcttcctccgcttttttcaccgcttccctccgccggcatgatccggatcaggtccgttaagggttgagacaaacgtctctctcagccgcatggcagcacccccagggtgaatatatgttattttacggatgatgcctcttttgcacgtgttaaaaacgggcggccattgttccataagacattgacaggcatatcgaaaaacgctgtaagccgctcgtcagaaagcatgtccctgattttcccggaggcgaacacctcgccctgttttaaaagcagcgcctgatcaaataccggcagaatttcttcagcgtgatgggtgacataaaggatggacggcgcattttctttttcggcgatcgacgtaatcgtgtccagcagctgctcccttgccataaaatcaagacccgtcacgggttcgtccaaaatcagcagttccggatcagccataagcgcccgcgcaatcagcgctctttgtctttccccttgtgataatgtttcataccgtctgtcggcgtaaccgatggcgcccaaatccttcagaagaccgatcgctttttcccttacttgctcactcggagtttcgtacagcccgattgaggcgtacgcgccgctgagggcgatttcaaaagcggagtccgcggcatataatttgtgctgaagacctgccgaaacaaggccgattttccttctgagcctgtcaccgagctctgttttgccgaattgatggccgagcacctgcatctctcctgaagtggggaagtaataagagcataacatattcagcaaagccgtttttccggctccgtttaatccgtacagcacccaattttcgtttttctcgacgcgccagttgatatctttcaaaatccatttcccgtttctttttaatgacacactgtccagctgtaaaatcattgcagtttcccccgtttgctttatttaaattttctaaaaacttttacacattagaatacatcacttctttgcaaacgtaaaccatcgcatgaaaaaagcctttaaacaaggtttaaaggctttttccgttattgatggatattcttattcatttgtttaatggctgccttttcaagccttgagacctgagcttgggatatgccgatttcttcagcgacttccatttgggttttcccttggaaaaagcgctttcgcaaaatcattttttcccgttcgttcagtcttctcatgccttctttcagagccagctcctcaatccattgtgtatccttgttgcgctcatcgctgatctggtccatcacgtaaatcggatcgccgccgtcattataaatcggctcaaacagtgaaaccggatcctggatggcgtcaagggcaaacacaatttcttcatggggcacttcaagaactttagcgatttcctctgctgtcggctccctgcttgtctcactgattaaccgctctcttacttgaagcgctttatatgcgatatcgcgaagcgacctcgagacgcggatcggattattatcccgcaaatatctgcggatttctccgatgatcatcggtacagcgtatgttgaaaacttaacattatggcttaggtcaaaattatcaatggatttcattagtccgatgcagccgacctgaaataagtcatcaacatactctcctctgttgttaaacctctgaatgacgcttaagacaaggcgcagattgccgtttacaagcttttccctcgctgaatcatcgccctcatcctgtaattgcctaaacagctttctcatctcttcattcttgagcaccggtaatttggaggtatccaccccgcaaatttcgactttatttcttgacacgtttttccctcccactaggagctgctgtacaacgttaagtatctcctcgggtgggaaaaatatgcaccgccattttacagaaataaacatccggctgcggcaatccttgcagcagtaagggctgtcagatggaaaaaattttacaccattttgttaaactcttttctcagtcttttgataatccgcttttcgagccgggagatataagattgtgaaatccccatcatgtcggctacatctttttgtgttttttcttcttctccgacaagcccgaaacgcagttccataatctgcttttctctttcgtttaattgctcaagcgcttttttcaaaagttttttatccacattggcttcaatgtcttttgtaataatatcatcatctgtgccgagcacatccgaaagcagcagctcgtttccgtcccaatcaatattcagcggttcatcaaaggacacctctgaacggattttattgtttcggcgcaagtacattaaaatttcgttttcgatacatcgcgacgcgtaggtggcgagtttgattttcttttccggattaaaagtgtttaccgctttgatcaaaccgatggtgccgatgctgattaagtcctcgatattgatgccggtattttcgaatttgcgggcaatgtaaacgacaagacgtaagtttctctcaatcagaatggcccgcgccgcctgatccccgctcggcagctttaataagagcacctgctcctcttctttagacaaaggcggcggcagcgcctcgcttcctcctatgtaatacacttcatcgcttttcagtccgagtttcatcagccatttataccacaaatatgtcagacgcagcttaagttttttcatcttcctcccccttctaaatacaacgcgttttgagtatgatgaataacagacttttcgtcaggaaacatgttttacagccttccctgtcagcatcttcggatgaacgattccgtcaaattcaccgtccgcggaaaatggtttcgtgctgatgccgatcaggcatttttcacaagcgatcatttcgtcttttgttaaaatcgtgacgtaatccggctttaaacagattaaaaattgattgtcctgaccgacgcccctgtatggaatcagcctcagcttatccgcatggcggaacgaatcatcaagctgctctatcacttcaagcggactggcggatttgatgaggtccgtttccttttcgctgagaatcggagcgaatttgtcaatgtgaaggatcatgaccggcgttttcgtcagcggatcatacagctgattcccggaatccaccaatcctttcgcgcggattgtctgtccgctgaattccgcctgcaccatgacaagttcatcgtactgaatggacttcgtctcgatgtcttcaattctctttttcgaaaaaaaccatatggccggaaatccgataactacaaacatccagctgatcgggtcgccgaacccggtctggcttgtgaccattacgccttgctgcacaattgattctgtctgcagcagggaatgtacgccgatcattcccccgccgacgagaaaagtcgcgaaataaaaggcgaacaaattttgaaaaaagtatcggaaccgtttaaagccaaaagccgcaagcacgatgactactgaaaacgccatttttcccgccggatgctccacaaagggagaaacaggcgtaaacatcagaagcacaatggctgacccgatgaaaccgccggcggccactcttctttttttcacctggcgttttaaaataaaggcggtcaataaaagcaaaagagaatcaaaacaaaagttcaacagccaaatgacatccagatagattttcacatctgacccctttcctcttttgtcttacttatctgtttctctctcttgtttcataagtataaagcaagctctgtgggaaagtctgtcaattaatgttgagggtaaagtacaatttttaagggataaccgttttatttgtcgagggccgaaagggttgatttcctattgtccgcttcaactaaaaaagcgctgccgtgatctggcagcgctctgttttactcattgatataaagttttcctttagccgtctgtctcgtttcatttccgtagtcatctctagcgataacgtcaatttttgctccgcttgctttgatggaagaagtcgccgtccagtaaccctcatatcgtcccggagaaatttctctcagcggaagctctgttgcgttttggctccctgcccgggcgtttgtcagaggcagacggataacgaaggaagcgtctaatttctttccgcttgaaaaagcgattttcactgattctccggcttttaattccttatccgctccgggaaccaatccggaaatgacgggagcattgtaattgacatcgatcaccgtctttttcgttgttttgttacccgcttcatctgaggccgtgaccttgatctcattgctgccgttttccagaagggttctcgcttgataagaaccgttattaacttcagctttttttccgttcacctttacccattttaaatgggcgtcgtgcacttttccttttacggtcactgcttctttatttgttttatcaccgtttgccggactgtcaatcgtcacatccggcttatcctcatccagtatgaccgtgacagggcgtgactcatcggttgacccgctgtctgtcacagatgccgccgtcagccgattggcatcttcagtgagtgtgacgccggcctggaaattgccgtctgcatctgctttcgtttctgcggcggttttaccgttattggtaagacggacagcggtttttggtgaagccgttcctttcaccgtgactgacttcttgtttgtaaatgaccggtctttaggcgacgttatgtcaggcacagaagcttcgtagtcgaccaaagccctgatcataaagtttccgtctgatttatcggttttagaccagcggccgtcgaggtattgccagtttctgttcgagtacggactgccgtcatcagatgacagggcaggtgtataaggatcgggtttcgtctggcggaacacaagataaaaatcctttccgaccgcgattccttttgagctgagatccactctggtccattcgccgtttcgaagcgcttcagcttggaacgggccggcaattttgctgcccggagctccatcagggccggatgcatcatatacttctgcttgaaattcggtaccgcccggatcaggccagtcggcgccccaaaatttaaaaaggcctcccgtcagcataccgtgttcttttccgtctttgagcgtcatcttaacggcagatttgctgccggctttaaaatatgacagcgcggcttcttccgttccgttatcataggcaatttccccttcataaccgatatacggcttaagcttgacgtttttttcagcatctcctttgatgtcaacggaaaattcgctattgtaaaagccttttgccgctactttgattgtgtaggagccttcgtacgccttaagcgaatattcccctttatcgtttgtcaccgccggttcaattgcggcatcctcagccacataaagcgcagccccttttaccggttcgcctgttgactgattggtgatggttccttttagcgtgccggacggcatttgctccagtgtaaagtctgcctgtgcggttttgtccgattgaatagaaacttgtttcgaagcggacttaaatccgtaagcctcggctttcagcgtatagcttcccgccttatgtgacaggctgtagcttccgcttgcagggtcggaatatacggatttccccgtctcggcgacactgatttgcgctctgagagggaggaggtttgtttcacgtttcactctttttccgggtgatttcactgccggtttggcctgtttcggactgacggcttttttcttcaggtggccgggaggtgtttgtcttttgtgtttactttttttagccgccttgccgagagggctgcttgaaagccggacatcatcgatataccatccgtcttcattgagtacttcgtcagactgcatattaaacatgagctttatgttttggcctttatacgcagataaatccgcctcttcatcgttccatcctgcggagtcaccattgtaaacggccgcctgctcccaatttgattttccttccggaagaacgaacacatacccgtaatcaaaaaattcttcgagcttgtgccagcttttaaattgcaaaaacagccgtcctgtttccggaacttgaatcggaggcatcaccaaattcatgttggctgaatcggcataagggccggacagattcgtcgcatacactttatctccggaaaatgcggtgccgggccctgaacccgggataccccattcccattggtcatgtgtcccgtaactggaccagcccgccggctgtgattcaaaatcctctttgtatcccgccgtaatgctcggtttcacgtcagcccggtacgtatcagattctacagaatgacctccgaaatcttttatggtccatttataacttaccttgcttcccgttacatccggaatctccgcctggtatgttccctttttttcatcaccgcttttttgaacggcggctgtcgttttccactctccttcatcaaactgataggaaaggatgacttcagttacgcttacatcgtcttctgctgtaaccgttaacggaaggtttgcccctttgtaagccgctgagaccggttcatggtgaaagctgggcggattgtgatcttcgcccgcagaagagaccttgccttctacgcctccgattccgtccgttacggcagaaacggcatcaaaagcgttaacgagaccgtggccgtaaccgttattcggtgattccggaaaaacggaatctgtcagcttttcggcggtgcgcgtcaaaacgtcttccatttcatcgaccgtaatagaggcgttcgcctgccttaacaaagccgccgtcgccgccacatgcggcccggccattgaagttccgtcccagccgccttcgtatgttcctccaggaatcgaagaacggatattcactcccggagccgaaatgtccggttttgtttcatgatacggtgaggggccttgaagcgagaaatcagcgagtttcttgtcgatgtcagtcgcacctgtcgcaaatgcttcaggataattggccggatttgcgattgaccccggtcctcccggtgtaaataagtcttcatttcccgcagagaattccggaaaaatccctgccgctctccacgcattcaccatatcgcggtaccactcgtccattcccgaaccgcctgcccaggaattattaacaacatccggcgccatctcgggatggggcgtgccgtttttatctttaggcgcgagcacccattcaccagcatccaaaatatcggcatcagttcctccgtcatctgaaaatgcttttactgcgatccatttcgcccccggagccacaccgatttgatttgagccgtcaggttctgaacccgtcatggtccctgttacatgagtgccgtgttcaagatcatcgtagggagcgtctttatgggacacggcatcataccagttcatttcatgattcggcgctgcgggattttcaggatcgtaaccccggtatttttctttaagcgccggatgatcccactgaactcccgtatcaatggaggcgacaaccgtgccggttccgtcgtatcctgaagcccaggcctgcggcgcatcaatttggctgatattccattcgatgccttcctttgctttgatctctttttgttttttcttcatttgaaaaggagcttttgattgtcgttgagtaagctgacgtttttcattcggaagaactttttctacttcaggaaatgaggcggctttttccattacctctttcgaagcagtgactgccattccgttgacaatataataggaatggatgtgatcagccttgcctttctttttttgtttttccaaatatgttttcagattctgctgcgcatcatgagccgccagttttaaagaagaaacgacggctgaccgcttttgatattcggtttttgctgcggaaagcgattgagacttggcgtttttttctgcttctttgaccgcttttttcgtattggctttctctttaaatttgataagaaacgtgactttatcatttttttcaaaacgcttcttgactgaatcggaaatcttatgctgaatgctcttagaggaagaaagatctttggtgaaagaaactgcccccggtgtgctgttcgctccggctgcacccggaaacaacagggaactgacgacaatcgtgcttaaaacagagcctgtccatctgtttcttgtttttttcttcaatcgtatccccccttatttggtaacgcctataaaatgtgtatccctccttcataattggaatcgtttgtcatttcgatgctgtacgttaaatgtagacaatcttccatccagatattgtcgcattctgtagaaagccgtatgaaactaaaaaacaatcaattcgtcataggtataaagtttcttttttcactgtatagatcatggggataggaaggaagactgtgcacaaaagaaaaaggacaaaaccatgtggtcttgtccttttttacatcagccgcgtttgttgcggtttcttaaaaatgtaggaatgtcgagggcatcatccgccggctgtgatgtatggcggttcaccgtgttttgatgctgtgtttcttctcgtttcggctcacgtttcgcagcgttttggctttgagacttcaatccttggtttaaagtcggacgctgcggttttgagtcatctttttcctgttcgataaaaccggtcgcaataacggtgacgacgatttcatctttcagattttcattgataactgaaccgaaaatcatgttgacatcagggtcagatgcagaagcgacgatgtcggctgcttcctgcacttcgtagaggctcaggtttgtacctcccgtaatgttcatcaaaacaccttgcgctccgtcgattgccgcttccagtaacggactagagatcgcctttttggcagcttcagcagcacggctttcgcccgtagcgatcccgatacccatcaatgctgaacctttgttggacatgatggttttgacatcggcaaagtccaagttgattaaaccaggcgtcgcgatgaggtcagagataccttgcaccccttggcgaagcacgttatcagcttcacggaatgcttcaagcatcggtgtgtttttatcgacgatttcaagaatgcggtcattcggaataacgatcagtgtgtcaacggcttctttcattgccgtgataccgcctgcagcctgcagctgacgttttcttccttcaaatgtaaacggtcttgttacgacaccgacagtcaaagcgcctaagtcctttgcgatttgcgcgataaccggtgcggctcccgttccggtaccgcctcccattccggctgtaacgaacaccatgtcagcaccttttagcgcttcttcgatttgttccttactttcttcagcggcttttttgccgacttccggattcgctcccgctccgagaccgcgggtcagcttttccccgatctgcattttcacttccgcttttgacaggttaagagcttgcgcgtccgtgtttaccgcaatgtactctacaccctgcacttcattttcaatcattcggttgaccgcgttattaccgccgcctcctactccgattactttaattgatgctaagccgtctatgtttgtttcgaaatccaacatgctaaatcctcctaatctgccgaatgactatcaatctattcccaaaacatgcttaatagttttttcattttgctcggtttgttgtgttcggcttgtgttttttgttttgcttttggacgctgctgcgcctctggccgctgatgatgttcttcttcgtgagagaccgcgatttcctgcacggcttcttccggcatatgaaagcctatttttcttccctgaattctggcatttcggcaggcaaattgtatcaagccgacacccgtcatatactgagggtctcttacaccgatataattcgggcttgcgacccttacattgtgcctcagcacttcctgtgccaatgaaagcactccgggcattgcggcctgtcccccggtcagcacaaagccgccgggcagatctgtaattcccatatgctcaatttcggctgcggcaatctcaagaatctcttccactcttgcttcaataatattggcaatttcctgctgtgtaaaagattgcttttgatttgttcctatgacggtgacttcaaatacttcatcttctgaagcctcatcgtagaatgcatgtccgaattgtttttttactctttcagcctcttcggtggaagtgcgcaatccgatcgatacatctttcgtgatgttttcgcctccgagcggaatgacggctgtctccttcaggtgcccctgttcaaataccgccaccgtcgtcgagccgccgccgatatcaatcatggcgactccgaggtttttttcgtcttttgacaaagccgccgaaccggccgcaagcggctgcaggcaaatatcagtaatttcaacgcccgctctctccacacagcgaagtaagttatgtaagatcgttttggagccggtaatcagcgtgccttctacttccaggcgcacgccgagcatttttttcggatcggtaatttcgtctcttccgtcaacgataaactgtttcggaacgacgtctacgatcagctgctcatgcggaactgacacgacctgtgccgcttccattaccctgcggacgtcttcaacgtgaatttctttgttttcactggaaacagcgacaacgccgttcgtatcttgaatatgaatataatttccattaacgccgacaatggcttttttcagcggaaaacctaccattctttcagcttggtcaaacgcttttcttatagaatgaacggtttcatctatatcaacgattgagccttttttcaacccttcagacggtacatttcccactccgataatgttaagggaatcatctgtcatttctccgacgatcacttttgtattggacgtaccgatgtcaagactgacgtaaagttcattgttgttcattctatggcacctcctcacatttcgatcaaattctattctattatttgcggaacaacaatacaatgaatgtggctttacaagtgtgtaacaaaaacaacagcatcaacaaattcttatctgatttctcacaatttatgtttaatgaaactattcgttatattctatgtatatcctcttttatatcgtattttttttatttttttttagagaaggcccaccttaccgtaagatttcttgtcacggtgccatactgtgcaaaccagatgcaaatatacccgctttccattagtctacactaagatgaacctccagaaaagctatagatattgccagaaacatccgaaaaaagaagaaacaggaggaaaattccaaatgcaatgctcattgcagaagacacgcccattgcattgagaattttccgcttgtccggcagccatatcccgggcaaaaacaaacatagtcataatgattccgctatcggttatatcggctgccccgctgattgtaatagattcttttgaaccaccttgaaattagttctttagaactattaatcattttcttttttcttgccggatttacctttgttaaattcttcaaaatacgtagcgacttctaagtggataatcccctttttcccgccgtccagctgggaaacgatagaaggataggtcttcatccggccggcaaacgttttaatagaagcggtaactacatacccgtcgttcatatacagcttgatccggtcctgatccatttttaccggtgtataatagatttcagaaatcgactgcttaagcgaaccggaaagcttatcaagctgctccgccattttgatccgctttttcgcgtttgtccagtcaaccaaaatcgggcccgcgtcatccggcgtgacttcgttcggcagcacagtgccgttttcgagcacttcataatacacatcatgtcgctgcagatacgcgatcgtcttatattcttcaatgtgaatgctgactttgttaggaaatacttttgaaagttccgcctttttcaccagcttattctgctcaatcttttcttctgtttgtttcttgttcagactccagaactcggtttgtccgttatgtatatcagaaagcgcgttgatctcttttacagacacgttttcgtttccggaaacggtgacagaagacactttgctgatcggcatctgcaagtacacgatgatcagcaccatcataaaaaagagcacaatgaatgaaatcagccggcggtttgctttttgcttccgctgctctttgattttcggaatccgctcttcaatatttacgattttttctctttcatgatttgggttcactgcctgtccacctcactaagaatgaaacagcttgacattcgtctgattgaaaaacaaacggcatgctgtgatgccgtttgacatttgttaaaagtatatcacatgagctcatgtaatcagagaaccttttaacgattccctccgatgatttcaacttctgtatgcatgtcaacatcatactgctcacggattgtctttttcacatattcaatcagatcaagaacgtccttggcagtcgctccgccggcattgacgataaaattcccgtgcatttcggacacttttgctccgccgatctgatgtccttttaatcccgctttttcaacgaggtttccggcatgattcggcagcggatttctgaatatgctcccggcgcatgggcttgaatacggctgagtgttttttctgtaatctttgttctgctgcatttgcgccgtaatggcttcccgttccttttgctcaagctgaagaactgcctcgagacagacgccggggcgttttttctgcaaaacagacgttctgtagctgaaatccatctcttcgttcgtcagccattcgattgtgccgtcttcaaataagatacgggctttcacaagaatctcactcatatcagatccgtgcgccccggcattcatatagacggctccgccgattgatccgggaatgcccgctgcaaattcgagaccggacattccttttttactcatggaagtcgcaagccggacgaccgaatagccgcctccgactgtcacctgatcaccgtcaatctccaaatgatccagacccgctcccagtttgatgacaactcctcttatgccttcatcaagcacgagcagatttgaaccccgtccgataaccgtccatggcagatcatgtttcttcacaatatccataatatctttgaccgcttccacacggttggggatgatcaaaatgtccgccggaccgccgattttcatcgttgtatggttcgcgagcggttcttgttccagcactttgccgacttcgcggtctcttaattcctgaattacgttctccatcataaacctccgcattccatttgctctatttttttatgtcttccatgatactgtacagtctggctgccgcatccggaacaccgagtgattttgtccgctcactcatgtcttttaaggtttcttcattcatgacgattttgtccagcgcagcgatcagtttttctccggtgagctcggtttccttcagtacgattgcagcgtcatgctggctaagcgccttcgcattgacttcctggtgattggctgtcacatacgggctcggaataagcacgctcggaatgccgagagcggtgatttccgcaatcgtcgtcgctccggctctggccacaatgacatcaattgattgtaagtactccggcatttggtgcaaaaacggttttgtcaccatattatcagcggcttttccgcctttcagctcagccgttaccttctcgtaatgcacttccccggtaatataaagcacttggtaaggtctcgttttcaattcttcctgcatatctataacggcacggttaatgggagccgcgcctctgcttccgccgaaaatgagcaccgttttttgattgtctttcagcccgaactcagttaatgagcggcctgtcttaattgagacgacttcagaggctctcgggtttcccgtaaacacaactttttcagcaggaaaatgcgattttgcctcttcaaagcaaattgccaccttattaacatatttcgagagaaacttatttgtgatgccgggcaggctgttttgctcatgaatgatcgtcggaattcccatttttgccgccgcgtatacgaccggaccgcatacatagccgcctgtaccgataacggcatccggtttaaactcttttaaatatgatttgcttttcttcacgccttttaagaaacgcatgacggtttttacattttcaaaagaaagttttcgtttgaaacctgtaatttcaatggcacgaaacgggatattttcccgttcaacaatttttttctcaagaccgttctctgttccgatatacaaaaattccacatccggatgccggcgctgaacttctttaataaaggccagggccggataaatatgtcctccggttccgcctccgcttactgcaatacgcattcgtatgtcccccttaatcacatagcgataaccctgttttttaggacagggttattgatgttgtctgtttttttatagataacgaataaatcatgagtgatgaggcaagatacagatcaatacctcgagtaccggctgacatttaaaagcacgccgaccgctgcgagcatcagcgtcagtgatgagcctccgtagcttaaaaacggcagcgtaattcctgttaccgggatcagccccgtcacaacgccgatattaatcatgacttgaatagctatcatagaaataataccgatggcgacaaagcttccgtataaatccggcgcgccgagggcaatcctgacgccccgccataataaaatactgaacagcagcaatatgagcgaaccgccgataaagccgagttcctcagataaaatagcaaaaatgaaatcggtttgcggctccggcaggtaaaaaaacttttgccggctttggccgagccccatcccgaacagaccgcccggacctacggcatagagcgactgaatgatctgaaatccgcttccaagcggatcctcccatgggtttaagtaagaggtaatccgtttaatccgataaggagcggacagaactagtgccgcaaatccgcttaaaccgatgagtccgaggaacgcaaaatgagcgattcgcgcaccggaaacaaaaatcatcacgatgcacgtgcccaccattaccgtccccgttcccaggtctggctggcacataataataataaatgcagaaaacacgattccgagcgcgggaacgaatccgcgtctgaatgacgtaatattcttctgtttttcagaaagaaatttagccagaaacgcaatcatcgcgagtttcataaactccgaaggctgaatgctgaacgctcccactccgatccagcttcttgaaccgttccgcaccattccgactcccggaatcagcacaagtacaagcagaaaaaaacaaatgatcagaagcagcttcgaccatgtgcgccatgtccaataatccacattcattatgaaaaacatggcaatgacgccgatccccgcaaacagcagctgccgtttcgcgaagaaaaacgagtcgtcaaatttataatccgcccataccgcacttgcactgtagaccataattaatcctattgttaaaagcaataacgtaatgataactaataacaaatcaggcgctgtttttttagtagtcaaagcaatcgacaccccaagcataagtcatttagggctgccgatgaacagagacaagcccttacttaagcatatgcacggcatctataaacatgtcaccgcgttcttcaaatgttttgaactgatcccagcttgcacacgcgggtgacaagaggatgacgtctccttcatttgagagcgcaaacgccgcagatactgcttgttcaacattatcgacacgtttgacatgttgtattcccagctcattgcccagtttttctatcttcggcgctgtctgtccgaacgtcaggaccgctttgacattgtccatatacggtttcaagtcgtcaaaaccgttgccgcggtccagtccgcctgcaagcagaataaccggtgctttgaacgcggagagcgctttgcttgtggccagaatattcgtcgctttgctgtcattataaaatctacgattctggatcgcagttacatactgcagacggtgtttgacaccggtaaagcttgtcagcaccttctgaatcgctttattagacgcgcccgccgtttttgccgcggctacagcggctaaaatattttctaaattgtgcgcgcccggcagtacgatgtcatcaacaggcagaatcgcttcatcgccgaacatcagcattccgtctttaatgaatgcgccgcttgacagttcctggtgaactgaaaacggaacggtgccggcttttccgctttcggcaagccgcacgactgtttcatcgcttttattcacgatggccgtatcactctcaagctgatgaagatacacgttctgcttggctttttcatagttttcacggctgtgatggtaatccaaatgagcgtcgaacacatttaaaatcaggccgatttcaggtctgaacgcatgagtccccataagctggaacgaagaaagctctgtgacgatccattcatcaccatcagcatgataagccacttcactggcgacagtgccgatattccctgcgatcagcgcctttatcgaatcagctttcagcatttcataaatcagggtcgtcgttgttgttttcccgtttgaacctgtaatgccgatgaattttgcattggtgatataatacgcaagctcgatttccgtccagaccgggatgtctcttctttgcgcttcctccaccatgatattttcatacggaattccgggatttttgatcagaatggtaatgtgatgctgatcaaaaagtgacgtcggatgctcaccgcagatgacttcaattcctctttctgcaagcctttgggcaggttcgttttcttcaaaggctttttgatcattcacgacgacgttaatgcctttttcatgaagaatcgacgcagccgcatatccgcttttcgccagtccgaggaccagaaagttttgtttttgcaaaaaaagttcgttttccacttataaccacacctcgatgtaaattcctaaaacggcaagcagcagtcccgcagtccagaatgtgacgacaactctccattcagaccatccgaccaattcgtaatggtggtgaagcggactcatcttaaagattcgttttcctgtcgttttaaagctgatgacttgtaagataacagataaggtctcaataacaaatactccgccgataatgacgagcagaatttcaagcttcgtcagaatggcaacggtcacgatcgctcctccgagcgcaagcgaaccggtatcccccataaataccttggcgggatgggcgttgaatacaagaaaaccgagaacggcgccgacaacggcaaccgagaaaatcgcaacgtcatattgtgactggttccacgcaaggatggcgaaagcgccgaatgcgatagccgcggtaccggacaagagaccgtccagaccgtctgtcaggttgacggcatttgaacctccgacaagcataaagagaacgaggataaagtatccccagccgagatcgattgacagatgtgtgcccggcaccctgatgccggttgaaaaatggcaataatgatatactccgtaaaatacaatggcaataatgatctggccgatcaatttctgcttcgacgtcaatccgagattccgtttcattactactttaatatagtcatccagaaagccgagcaggccgtatccgatcgtgacaaacagcagaagaaacatttccgcgctcagatgcgaaaatttctgcgtcatgacaatcgccgtaatggcgatggatacaataatcatgaccccgcccatcgtcggcgtccctgattttttcatatgtgatttcggcccctcttccctgatactttggccgaattttaaacgtcttaaaaacgggataagaatcggagatatcagaacactgattaaaaatcccattattattgtaaataaaatcacttgctcaagcattgctcttttctcctcccgtttcgttcaaacgacatacgtatttatcatattcacattgtgtccccgtaattcttttcatttccctcattctaacactctttcctgttttactttttattcagctcaacaatagctcttcccgctacttcggcgtcatcaaagtcgaatgtttcattgccgatctgctgataggtttcatgccctttcccggcaatcagaaccacatctccctttttcgcgttggcaatggcaaaaaagatagcctgctcgcgatttgcgatactgtgatagtaagtgccttctacccctctttccatatctcttaatatggccagcgggtcctcgcttctcgggttatctgaagtgaaaatcggttcgtcggcaatccgcaccgcaatttccgccattttcgggcgtttcgttttgtcccggtcaccgccgcagccgacgacgacgaaaagcttgccctctgtcatgtctttgcatgtattcaggacgttttccagactgtcaggcgtgtgcgcgtaatcgacgaccacaggaaacggctgattgtgattcaccagttcaaaccggcctctgacaccttgcagctcttcaagagcgcttgtgatcgtatcaaacggcagacccgctgcgatcgctgtcgccgctgcagccagtacgttatacacgttgaagcggccgacgagtgaaaccgtgatctgctttgttccttttggcgtaacgagttcaaagcttgtgccttgcgcagagatctcgatttgtttcgccatgacatcggcatcattctcgattccgtatgtaaggatgtgcgccgccgtcactttttcaaaataagcactggctttgtcatctgcgtttaaaacggcccgcttcggcttttcgtgattaaaggagccgcccagctgggaaaacaggaggcttttagcctgtctgtagtcttccatcgtcttgtgataatctaaatggtcctgcgtcaggttcgtgaatacggcgatatcataatcgcagccgtgaaccctgccgagtgacagagcgtgagaagacacttccataatagctgtgtcaacatgctcatcattcattttcttgaacgttttttgcagtgtgacgctttcgggcgttgtatttttgaccgggaatgtctcatctccgattttaatgtacatcgttccgattaaaccggtctgtcttcccgcttttttgaaaatctcatcaaccatgtgcgtcgttgatgttttgccgtttgtgccggtgatgccgataagctgaagctgctttgtcggctgcccgtaaaacacgtcagaaagaacgctgagcgcccgctgtgaccggcggacaataatgacaggaacatcgacgtcaagctctttctcggcaacgatggccgctgcgccgttttctgcggctttttgggcaaaatcatgtccgtctaccgtatacccttttatacacacaaaaagactcccttttctcacttccctggagtccatctcaattgaagttatgtcagggtcatgaaagtcattttgaacaggttcggccattaaatatgtaagcagctttgtaagtttcattgtatcaaacctctcagaaattctattcattcttttatcatgataaccgttttaaaagtcagaatggcttttaaacatacagttcatattttagcgtaaataaaaggatacatccagttaatcttaaaagttatcttctttttttctctttatgataagaggcagccgaaaacaatcggctgcctcaaaaagactcattcttcactcaagtaaacacggatctttgagccttcttttactttcgttccggctgcaggtgattgtttcacaattttgcttccttttcctgaggagtcaatattcaaattgacaagcagcgactcaagatcagagacagacatccctacaacattcggaacctctattgtttttgtgtcgttccattgatattttttctcgatttgattttttcgcggtttcacgccgagctcaggcagactgtctctcatcatatttccgacaatcggcgcggcgacggttcccccgaattgaatcgtacctttcggattatcaaccgcgacatacacgacaaggctcgggtcatcagccggcgcaaaaccgataaaagagacgatatggttattttcgagatatttgccgtctttgaccttttgtgcggtacctgtttttccgccgacgcgatatccttccacgaaggcattccgccccgttccctgagcgacgacgctttctaaagcatatctgatctgctttgacgtttcctgggaaataacttgccttttcgcaatcggcgattgtttcttaacggtttttttcgtaacgggatcaacccactctttggcgataaacggagtataaagcgttccgccgtttattgctgcggaaacggctgccacctgctgaatcggcgtgacggaaaccccttgtccgaaagcggttgtcgcctgttcaaccgggccgactctgtcaagcggaaataagatccccgttccttccccttgcagatcaatgcctgttttctttccaaagccgaagtccttaatatattgaaacagcttttgttttccgagccgttcccccagctgtacaaacccggggttgcaggaattttgaacgacttcaagataagattgcgaaccgtggccgccctttttccagcatcggaggcgggcgccgtcgacctcggcaaaccctttgtcataaaagtggtctctttgcaagtttactttttgctcttgaagagccgccgcaagcgtaataatcttaaaggtcgaacccggttcatatgtgctccataccggcaggttccggttataaacggacggatccaccgattgatagtcagccggatcaaaatcaggacggcttgacatgccgagcacttccccgtttttcggattcattgcgaccgcaatcattccgtccgggttatatttcgccgctgcattgtcgagctctctttctataatcgtctgaaccttggcgtcaatcgtcagtttcatatcaagtccgtctttcggaggggtgtaatcatccgcttcatcaggcattttcttccccttggcatccgtataaaattttacggatcccttgacaccttttaagtcatcatcataataagcctccaatccgagaaggccttggttatcaataccggcaaaaccgagaacatgggacaaaaagcttccgtacggataatggcggatgctgtcttcagccacataaaccccctttaagtcgagcgctttgatttctttcgcttttttattggaaattttccgcccctcgggtgagattttttctatggaggttttcttagtaatgtgtttgtagaccttctcttccgacatatttaaaactgacgcgagaagcttgcccgtttttatgggattttggatctggcgcggtacgacaaagacggtcggcgcgcttttattagtagccagcttcacgccgtttcggtcaagaatctctccccgctcaggctcaaacggcaaattccggctccaggaatccttagccagtgaagtcagcttttctcccatcacaaattggacatagcctaatctgctgtcaatgatcaaaaaaatgattacgccaaaaagcaaaaccagtaataaacgttttcgaaccgttacatttgaaacgcgcaagggaccgtccactccttatttaggcttgtttcaatttatgcctcagcttggacacatagaacggcggcgtataaaaaagaagcccgcgggcatccgcggacttctctgtcccgttaatcaggatttttaaatttcaccttgatcacggtattttctttcagttctttgccttttttcacactttggcttgaagcgtaaccttcaccgctcacatcaatgtgaatacctgatactttgctgaattgaagcacttcccgtctcgaccatccggacatatccggcatcgtcatctttccgtctgtttttaagaagattttctgattggtgatcacatcttctccagctgtcggatactgctcttttacggcaacatcgctgccaatgacaatcggtgtgagatgttcatttttcgcttccttctcagcgctcttgaccgtcttatctgtcaggtcaggcatcttttggcttttcgtttcttcctgaccggaatctgttttttccgtcggttcgatattcaggtagtggaggctgtttttcatcgtcgggttaaagatttccgcgacaggatcagagctgctttgacccgcttttaattgcggctgctgcacggctacatagatgacgagcttaggatcatttttcggcgccatgcccatgaatgaaaacacatagttgctcgttccctttaaatatccgcccgtcccggcgatttgcgcggttcccgttttacccgcgacgtcaaatccttcaattttataaggttttcccgttccgatgtctgacgtcacgacttctccgagcaggttccggacttttttcgccgtatcggctgaaatcggcgtgcctacttgctctggttttgtctgcttgacgacttttttcgtatcggggtcgacaatatgatcaatgacgtaaggtttcatcattttgccgttattggcaatcgccgtgacggcctgaagctgctggatcggcgttatcgccgatgcttggccgtaagccgtagacgctttgtcaaaatcatatttgtagttaattttacttgatacttcaccgggcagatcaacccctgttttttgatagagcccgaatttgtgcaggtactcattaaaccggtcaaaccccagtttttcgttggccagtttggcgaaagcaacattcgatgacctcatgaggccgtcacggaagcttgtcataccccagccggcgccttcgttccaatctttaacaggtttgcctcccactttatatgttcctgatttatatttctcgtttgcagaaaacacattttcctgaatcgccgcggcaagcgtaaagatcttcatcgttgaacccggttcatacgcgtacgacactaagtcattgtaataattggtgacgtttctgatattcgggtcaaaactcggacgctgccccatcgcgagcactttgcctgttttcggttctacgacagccgccataatttttttcggtttatatttttccgctactttcgtcatgctgtcttctaaaaaggtttgaattttctgatcaatggttaaatatacattgtcaccgtttttaggtgcggtgattttttctttgctgttcggaagtttccagccggatttatcactttcgtaagtgacagatccgtcgcgttccgtcagatagttattcagtattttttcaagccctaaagagccctgtatctcgtttgttttttcattcacatcggcatagccgagaacatttgacaaaaatacaccgttcggatagtagcgcttcgtatctcttaagaaagaaatacccggaagattcattttttcgatcttttgttttttcgcataagagatatcgcggccggctgaaccgaattccacctgcttcgcgccatccctgtttaagatgtccagaatctcgcttttatcaagattgataacggtcgccagcttttccgccgttttctctttgtctttgacatgctgaggatgcttcttgtcggtcgtcatctttttatcaagcacggcaatgagcttatatgtcgccgtgtcctctgcaagcactttgccgttccggtcaaaaatagagccgcggctcgcttctatcgtccgctttttttcgtgctgctcggtcgcttttgttgcaagttctacaccgtttgctttaccggttaattgaatgtacgccattctcccgagaatgacaaagaaaaagagagcgaaacaaatactgagtatcgctgctcctctgttcataaacttattttttttcggcatgggttatcattcctgtatgtttttcacttttttatctttcagattcaaaccgtgctttttggcgatatccatcaggcgttgcggctggcttaagtcagcagccgtcttttcgagatcaccgatctgcttattctgctcagatactttctcctccagtttttgcacctcaatattggattggtacgccgcgtatgcctttgatacgataaacattgatgtggagagaacggcaatggcaaacaggacgagcagcaccttttccccgagtgtaatggaagccctctttttgacaatcacctttttttcgggacttatcactggccgttgttgtttttcctgctggtaagctaagttgctcataggctgatgacctcctttaatgttgtcatttgctgcccgttattttcgtttctccgcaatgcggagcttcgctgaccgggcgcggttattttcttcaagctcctcttttgatgccgtaatgggctttctcgtaatcagttttaattccggttcaaattcttccggtatcacgggaagacccggaggcagttcgggaagtgatgatttttccttgaatgtcgtcttgcacattctgtcttccagcgagtgaaaagtgatcacagacacccttccgcccggcttcagcacctctatcgcttgcaagagggcctcttcaaatacttgaagctcgtcgtttacggcgattcgaatggcttggaatacacgtttggccggatgacctccgcttcttctcgccggagccggtatcgcgtcctttattagatcgaccagttggccggttgtttgaataggcgatttttctctagcctcttcaatttttcgggcgatctgcttgctgaatttttcttctccgtatttaaagaaaatcctcacaaggtcctcataccgccattcatttacgacttctttcgccgtaagggcggccgactggtccatcctcatgtccagcggtgcgtcatgatgatagctgaatccccgttccggtgtatcaagctgcggagaggatactcctaaatcaaataaaattccgtcaacactcgtaatgccgtgttcatgtaaacactcttttaaataacgaaagttgcttttcaccagaataagctgtcctttgtattcggacaatgttttctttgcgttttcaagtgctgtgtcatcttggtcaaaggcgatcaagcgtcctttttccgataattgctgcaataaatatgtactgtgcccggcgccgccaagggtgcagtccacataggttccgtccggtttgatatttaaaccgtcgacggtttcacgaagaagtactgtcttatgctgaaacatttgtgtcggtcccacctttatcaggaataaattgaattgtcagttgttgttgtgatgcacgaagatccattatatatcaaatccaatcatgttttcagcaatttcagcgaatgaatcttcttgctcttctgtgtattgttcccatattaccttactccacaattcaattcgattggaaaccccgatgacaacacattctttttccagttttgcgtaattcagaagagatgacgcaatattaacccttccctgcttgtccagttcgcattcggtcgcaccggaaaaaaagaatcgggtaaatgcgcgggcgtcttttttggtgagcggcagagccttcagcttttcttcaatcagcttccattcattcatcggatagccgaaaaggcattggtccagtcctctggtcagcacaaactgctcaccgaggccttctctgaattttgcgggtacgatcatgcggccctttgcatcaattgtatgccggtattcacccataaacatgataaggacccccactttctcccctaaactcaccactatccgccacttctctccacaacctcattttacactgtttacacataaaaaaaaaccctgaactattcagggttctttaaaactttatttcaaagtttgacaatctgatgttggttttgaaaagaaaatggcagatgtttgaaggttgtgaagaattttggaccgtagcggttcagataatacatcacattccaaatccgttcctgcggagcgccgagcggtctgatgctgttttggattctttcatagtcacgcagcacaaagccttctttttcttcaattcttttcgttaccgtccgttctaaaaacaagagctgatcttgaatgaaggcggcattcttctgtaagagcggctcaaggcttgaatcgaccttcagcgcttcgtcccttgcgcttttatggatagcttcaatctgcgacttcgcctgctccattacagaagtaaactcttccggaatctgctcttcaaaataattgtctttcaggtgtccggtgccgtgttcgatcgcttcctgaagctggatattccgttctgaaagcttcttttcaatatggcgctcaagaatcgtaatgttcagtctcggcactaccggcgtcatgcgaaagcccattaatgagaaagcctgcttcagctcaccccaataattgatctcccccggtcccgcgataaacgccagagtcgggatgagaaactcctgcataagcggccttgtcacaacgttattgctgaaacattccggtttttcttccatatgggtatgaagctcgtcgttcgtccacttcaggtcaagctccttaatgacaaaaacgccgttttctttttcaattaagaaacgctctccctcgtgttcgtaaaacagattggcctgatctttgtccgattcaataatcgggtgataaccggcttcccgcataaaacactgctggtctgaaacggctttggcaagctcatgattgtgttttaaaatctgctgaaacatacccgtttccagctttttaatccccggatctcccgagttcatcagaataaggccttcttcttgaaacaagtcggcgatcaacagctcaaaaaagtcggtgaatgtctctgatgagcgtaaacatcgcttcacgttttgaaggagtgtgtttgtgtgatccgtttcctcaaaagcagcgaacacttcatcaatccaagccgcgcatttttcctgatcaagctcggttttagccgccgatgtttttttccagtacgactgcggcagtttctgtttcaccggacctttattctctgttgacgtatgcacaaaattgatttcttccagatcgtgatcttcacccgccacccagaaaatcggaacgacaggaatctgtaacgcctcttcctgctgtctggcaagtacgataatggagataattttatgtatggtgtaaagaggccccgttaaaagaccggcctgctggccgcctactaccgctgcgctttttggatctctcagtttttcgatggaggcctgcatggcggcggagtgaaatttttcgtgataggaggataaataatccgctaattcctctctggcaaacggccgcgaagacaagtcatgaagccgcttttgccatacgtcctctgaatgaatatcataatcaaaaaatgaagacatgttttctccatctatatagtgctgcacaaacttattttgacttttgatggaaagttcagttagctgcatctgtctggaacttcctttctccaataaatagttaggtttccgaaatgagtatagcatgttaccggaaaacctcaaaagactttgtttcagtttctttctaacgcttttatgctgcggtgtaaaaacgtgagatgaacggccggcaatccgcggctttccgcttcttttacaaggtagccgataatcgcatcaacctctgtccgcctgcctgccatgatatcgacgagcatggaagaatgatttttttccgtcagtctgcacacttcgcaaaccttgttccacgctttttctctatcggcgaggccaagtattgtctccgcttcttcaaacacgtttctcatatattttttgtaagcgtcatttcttaacagctctccgtttttcacgcgcagcaatgcagttaacgggttgatgcatacatttatgatcagttttcccgttaacagccgataccagtcgttttcatcatatacaggaaaatcccggtgcatgccggaaaagatgcttttgagcgtttccggccgggatgcgctgaatacactccatcttacggctcccgctcccgtatgttcaacggcatgatctgatatcttttttgctccgtgctcaactgtgccggcataaagcgaatgatccgtatgccaatctttaatgtcgtgtatgtgtcccatgccgttttgcaaaaacagcacattcgtcccttttatcgtctcaagatcccgcaacacagcccttagctggtgctgtttaacggctgcgattaagaggtcgaatccggaagtgaggccggtttgcgctctgcatgccgccgtacattctattccgtctttcaaaagccgtataccgcctgagttaatcgcatcagcctgctccgtccgccgcgtaatgaccgttacctgatggcgggacgataagtagtaagcacataaaaggcctaccgctccgccgccgataattccgattttcacactgtcacaccctatatctgcatttttccatattatcatagcagaagccgccgcaaattacttcaatttcgttttgagcaaaaagactggcaagcatattatagttggaattttcaattaaagcgtttacaataatggtagaacacaacaaagggggagtttgtgttgaaaatagagcgactgctcatcaactttaagacactcgaagaatttaaaaggtttaaggaatacgggatgcaggagctgtcgatgcttgaagatcttcaggataatatcattgaaaatgacagcacctcgcctttttacgggatttacttcggggataaactagtggcgagaatgagtttatatcaggtaaacggaggtgcgaatccgtattttgatcagcgtcaggactttttggaactttggaagcttgaggttcttccgggctatcaaaataacggatacggaaaagcgcttgttgattttgcaaaatccttcagaatgccgatcaggacaaattcacgcatgaaatcagcagatttctgggataagatgaattttgagcccgttaaatatgatatggcgcgtgataaaggagaaaatccttatatctggcatcccgatatggacggtgaaatgacatccggagaaacggcataataaaaaaccggcggggccgccgcccccaggccggttcattttacaggctctgcgccgattttctgtcgtcttcttttgaattgaccatccttctcgctctgtccataatgtcaattagcgctttataatcttcttccgtcatctccagcttgtttctcaagctttcattttcctcacgcagatcctcgacttctttttgcagcgcggtcagctgttctgtgagtttttctttttcatgacgcacatccgctgcggccggcgactctttaaattgctgcagaaacaaaatgacatcatcaatggacagctctttttctccttccgccctgcggatcggaggctgtttgacggttcccggcatattggcggaatgcaccccgatctgctttcttaattccttccgctgttttttcgccagttctatccctgactgatattgttttctgacataagaattccatctgaacccgcaggcggcagccgttctcgtcagcgctctgccgacttcttcaaaagcggaaagctgggtcccgccttcccgaatatgcctgagcaccacttcggccagcagcaaatcttcatcttgcgtccacgcgtcttgtctcgttatcgtcaatcgtatctccctccatatttgctcatttacctcatacatatgccgctgatagattagatagactactggggctcacaattttttcggcggaagcaggccggaggggcaaaaaaaaagaaaagcgcaggaaccgagattcccgcgcttttcttcatacattaattgcttttaacatttatgtctttgccgttgtatgatccgcatgctttacatacacggtgagacaatttcatctctccgcatgacgggcattctgtcataccaggtacatttagtttgaaatgtgtacggcgcaatctttttttcattttagaagttcttctaaaaggtacagccattattcccacctccttaaagagttaagattcatcatcttgtgttaagagctttttcagatccgcaagtctggggtcgatttgatttttcttgtcttcctcagaaatcacttgccaatccttccccacttggggagcggctccttctttttgttcagtttcacaaaagacttgcataggaatttctaaaagaatctcttcttttatgatcggagttaagtcgacgatatcgtcttcagcaatatgaacgtcctcatcttctatatcatccgacttatgaaatctaaacagttcttttgtcgcgattgtaaatggatacggcacatcaactaaagttcttgagcacggcaaaaccatttcgcctgaaatcgtaaagtcaaacgaaacttgcttggattcaatctccgcgcggcccttcacccggacaggagaaatgcggcggatgtcagaattcaattttgtcagctcatttaactcaactgtttcatcaaattcaaagctctttttcgccatttgatgaagctgataaatcgtccatttcatttgtatcacctcaggaaagcaacaaacatgattatagcttttcagaatgtttttgtcaatattttttctttacagcataatgccgccgtcatgcaatcgttgacagccggataggctatgcatacactaaacgaaacggactaaaatatgcacttcatttgcaaatgtaccacacgaagcaaaacatagcaagaaaggcgggacaaatatgaaagcagtcggcctggttgttgaatataatccctttcataacggacaccgctatcatgcggaacaagcaaaaatcaaaacggacagcagcgtcgcggcggcggtgatgagcggcccttttttgcagcgcggggaaccggccgccgtctcaaagtgggcccggacaaaaatggcgctggaaaacggcgtggatatcgtcattgagctcccttatatatatgccgtacaaaaagcggaattattcgcgcgcggcagcgtttcgcttcttcatcatttaggatgcagcagcttgtttttcggcagcgaaaacgggcggatcgaaccctttattgaagcgtctgaagcgttcagccgaaaggaagatgactgcagcctgattctgaaagaggagctgaaaaagggtctcagctatcctgccgccgcctcaaaagctttttcacacatattcaaagggcgggacatgctcgatttgtccaagccgaacaatattctcggttttcactacgttagagcgatacacacctccggttccgctatgaagccttatacaacagccagaatcgcttcccaatatcatgacgccgagcttcccggagataacagccggatagccagcgcaacaagcatccggagagcgctgatagaaaaaggaacggcggccgcaaagagctttctcccggaagcatctgcgcgtcagctggaggcatacagaaattcatacggaatatggcacagcacggaagactatttttcatatgtaaaatacagcctcagcactctttccgctgaagaattgagccgaatctatgaagtggaagaaggccttgagcacagaattctgcgcaccatcagacaagcccgatcctatcgcgaaatgatggaacgattgaaaacaaaacgatacacgtggacgaggctgcagcggatgaacacgcacattctgacacggacgaaaaaagaagacatgcatcggctcttgcagccttcaagcgctccttatatccgtcttctcggaatgacgaaaaaaggacaggcgtacctgtcggcaaagaaaaaagagcttaccgcacctctcgtcagcaagctctcttctttctctcatcccgctctggatctggacatactggcgggacgggtttacagcctgccgataaaagaacctgaacgcacattgtttgagaagcaggaattttcacaagccccgatccgctatgatgaagacgaaaagcgttttttgaatgcgtaaaaaaagcacctgactgtatcaggtgctttttactttcagctgatccaaatagtcaagtgcgtcctgcatggtgtcgacagggacgatcttcatatcggacttgattgctttcgccgtttttaccgcatttttgtaatcagaattttcagctccgttttgattcggcgcaaagaaaatatcttttcccgctttgtctgcggcgacgactttctgatcgattccgccgatcggtccgactttgccgtccacgtcgattgtccccgttccggctatattatagccttttgtttcgtcaggttttgtcagctggttgtaaatttctaaagacatcatgagacccgcagaaggcccgccgatgttttcaatgctgaaatgaagatccggcttcactttcacgttccggtccgtatataacgcgacgccgattcccgctcttttcgggtcgtccgggaatgatttcagcacaatgtcaacggtcttttctttcgtgtcccgttcaatgtgaaacgttactttttcccccgcttttttgctgctgatataatcaatcagcttttcagcggattcgtatgttttcccgtccgcgctgatgattttatcaccgacctctatttttccttttgccggcatgtcagagacgactgagctggcataaatgccgttaaatgagtatttcacctgtttcccggctttttgataagcggcaatgaccgcgttttcttgggagcttttcatcatttgcagctggcgcttcatataatccgagtccgattcgccctcttcttttatgctttcgtcagggacgatttcatcgtaaggatgcactttcgcccaaagatatgtatacggattggcagggcctactttgacagtcatcaaggaaaggcttcctttttcaggatagcctccgtccaccttaatcagcggtctcagctctgatgcttctcccggctgtgtgatgtaatacggaagcttaataaatgtaacagcgattaataagatcaggatgataaacacccagcgaaaatgttttgctttcatatgagttagccctcccagttctctatttcttgtttaatccggccgatcatccggtctgcggcttcttcgcccgctgtgatcatatgatcaatgttggcaaaagaacttgagctgaatgattcaagagaagggcggatcatgacgtctgcggcaatggtctggtgacggaccaattcattttgcagtatatccatactttgcatgattacatcaaaaatatgtgccgccttttccgtttttttcacccgggatacgtcagaggcgatgacgatatcagcacccatatcttttacggcggaaaccggtattctgtcgaccaccgcgccgtcgactaacatacgtccgttcattttttgcgggacgaaaacgcccggtatgctgatgctcgctcggacggcttcggatactgaacctttcgtaaaaacaagcttttcgccggtctgaaggtcgcaggccacaatgccgagcgggatccgcagttcttctatcggcttgccgtacgtataggcatgaacgagctgcctgatgcggtctccttttaaaaaaccaagcctcggcatcgtataatccgcgtacagccgccgtttaaatgctttagcgacttttttcatcgtggccacgtcatgcccggccgcataaaagctcccgactaatgctcccatgctgctgccggcaatcatatcaattggaatctgatgcttatgtaaactggataacactccgagatgagcgatgcctcttgcccctcccgaacctaacgctaacccgattgtaggtttggccaacgcgacgaaccccctaatagacatcctatacatgaattctatggtctaaattgaacccctatgctcgtatattagtacaggatgacaaataggtacttgcccggccgcctttaaggtctgttctatattttatcatgatataaatgtcagtgtgcaattttagcatcggggaggtaagaatgaatttgtctaagtttcatacatttttgatttcattgtttttcatttttttgacggcgacggttatttcacaccctcaggcctcattcgaagcctccaaaaccggtctttccatgtggtgggaggtcgtttttccttcattgcttccgttttttattctatctgagcttttaatcggattcggcattgtcaagtttgtcggccttttactcgaaccctttatgcgtcccattttcagagtgccgggggtcggcggatttgtactggctatgggcatggcttcaggcaatccggccggcgcgaagctgactgcacggctgcgccaggataaacaaatctccagagtagaggctgaacgcctcgtctcttttaccaattcatccaatccgttatttatattcgctgctgtggcagtcggcttttttcataacgcgtctctcggcattctgctggcatcggctcactatctcggaaacatcgccgtcggcctgacgatgcgttcatacggacggaaagaagaagcggcgtataccggtaaaaagacgatcgctctcccttctctgaaggaagcatttctggccctccacaaggcgcggctttcggaaaagcggccgctcggaaaaattttgggcgacgccgtcacctcttctgtacaaaccttgctgatggtgggcggttttattatattgttttcggttttcagtcggttattatcaatcgtacaagtcatggatgtgctttctgtatttacaaacgcgctgctttcgctttttcatcttccggcaaatctggacatccctcttatcagcgggatgtttgaaattacacttgggagcaaactggtcagtgaagctgatgccgacttgctgccgaaagccatgattgtgagttttattctcgggttcagcggcctttccgtacaggcccaggtagccggcattttatcggaaacagatatccgctttaaaccgtttttcgcggcgcgtatccttcagggcatttatgccgcactctttattctcttactgtggaagccgctttaccttgcattggacgaaccttaccagtccgtattcctccctttccgcgatcaggaagcggtatctgctgtcgtcagcggatggaatacacttgttgaaaccggacccgccatcacgctgacagctctcgccgtatacgcattgatttattgttacaggctgtcagcacggacaaaaaaaggatgagacgccaatcagcgcttctcatcctttaaatttctgcttcagcgcctgttcaacttccggaggaacaaactctgaaacaggcccgttatattttgcgacttcttttacgatgcttgaacttaaaaaagagtactgattgttcgtcatcataaaaaaagtttctattgattcgtcgagcacgcggttgacggaagtcccctgcatctcatattcgaagtcagaaacggctctgagccccctgataatcgccttcgcccgcttttttttcgcatagtcgattaacagtccctgtgacgtctcgaccgtaacattcggtatgtcttttgtcacttctcttaacagctcacatcgttcctcaactgtaaacagcggctgcttagaagaattattgagcacgcatacgtacacctgctcaaacacgtttgccccccgtctgataatgtccagatgtccgtaggtaacgggatcaaaacttccgggacatacagctatacttgccacatcactaccccctatttcggtatatcgtcactcctgtaagcccgtaaatttcccttcttgttacggaaagcgcgccgacggcttcaggaagcgcaacggctttatcatgctcggctacgacaaaaccgtcttcattcagcatgttctgctcatcaatcatttcgataagcgctttcagcttttgctccttatacggaggatctaagaaaattccgtcaaaacctttttcccgtttcgccgcggcatagagagcccgctctgcatcattgcggtatacttccgctgaagacagcagatcaagcgctttgatattcgcttttaccgtttggatggctttgaaatcacgatccacaaagatacagcggtcaaatccgcgcgacagcgcttcaatcccgagaccgccgctccccgcaaataaatccagccccgttcctccgtcaaaatacgggccgatcatattaaaaatagactcttttactttatccgtcgtcggccttgttgatgtgcccggcacagcctttaaggctcgtccttttcttgaaccggaaattactctcattattcacaccactttttctgaaaactttgatgtttctcatcggctgagccgttatgtatcaaaacaatccttatcttatcataaagcattctttcaaacaatgaacgtgaaaccgtgtatacatattcacattcctgtcaagactaagtgtaacagcatcaatgaatgatgttgttgccaaccgcggagaagacttacgtttccccataagttcttcctccggtttctcctctcccttttccttctccttaacttgttaaggaatagaaggaccccgcaggtatctgcggggatttttttatatgccgattttataatcgtactctttcgctttatcaagctttgattcaaattccagctttaaaaaaggtttataagaaggctctaccttcttcacataagaataagaagaaatcttttccattgttttttcgattagatccatatcgcaatacagcacaacgtatttcagccgcttggaaacataatgaacgttgccgaattttctcagcattttgctgtgttttaaagaatgcagatatacgattatgccttggcgcttattttccatcatgatcacccgcctgactttctgttcattttatgtaaaagacgagacggccgtctcgtcaggaaactttgcatccgcagccgccgccggaaccgcacccgccgccgcaggatgacaggccgtcaaaataaggattccccgtcggaacttttacatgctccgagacggccgttccgagttcaatgctgatctcgtcaagcagcgactgaagctcagtctccgcttttttaaattcggccaccttatcgtttaaatccagttcccgcttcatttctctcattttgcgggaaatctctctataatcaggatggtatttgccaaagcgctgcacatcctcatactgctctttaacgctcataaaagaacgaatgatccgccctgcctcttcatcttcacggagacgcttgtaacaatcgcggtaattttcagccgtctcagactgcagaatcatgccggcaagctgctccgcttcactttgaagcttgacggactcaattgttgcatacataaatacgcacctccagttgctagtttaccatgaaaccacccaattggaaaatgcggcgtttaaacgctttttaatcctgtgaacgcatggcgtgaaccatctgcatcatcatctgcgccatttgaatcccgtttgagaattggcttacccgatgcggtatcgtcttttcataaaaattcatcatgtcaagctgaaaggaattgagatcgtccggttttctcgcaagtctgcggtaccagacgggacgctgccgtataaaccgtttccgttcctcatctgcggatatgaattcctgaacctcttttcgcatacacgatccccttctttaatcctttctgaacgaaaaaggatgttgtccggagccttgccggggctgcttcgtgttgctccccgaaaattggcttaaaaggctttgcaatgatgaaatggactggctcattttattgatctgctcattcatttggttgatatccatctttttgacggcagtgaccatttttgaaacgaaatcgtttttttcagctggttcctgtttggtttccgcgtcggaagaaggctgaacggcctcgtctttaaaaggatcccatatcggatcatcctcgcccagaagaacccaattttcatagacttcctgccagctcctttgttccttgcgaacattttggatcagtttgggatgcttttttacgaattgtttaaaatcatcgattgattgccgtgattgctgattcgccacaattctcaccccctccgaaaagttttgcctgctataatgtatcggttcattcgccttaatgttcgcctaaattgcgaaaaaaagcaggtatatttttttcagcaggagcgccgctcgcgaaaaaacataaaaaaaccgcgggggacgcgcccctctgcggttttttactgccaaggcttaatgaagttttgcgtataatacttccggtccacgccgacaccgaggtgcgtataatccgggcttaacagcgcctttctgtggccttcgctgttcagccagccctccacggctgcaggaccgtccacatagttgtaggcaatattttcaccggcctcccggtatttcacatcgcctttttccaagcggtccttcagagtcccgtatttctttgagacgtgagagaaatacttgttatccttcatgtccttgctgtggccgaatgccacttttgcggcgtcttcgtcccatttcagccttgcaagtccgtgtttcacgcggatgacatttgtaatatcgagaatctgctgttcactcgctcgttcaatgtcgttccattttttatcagaaacaggctcgggttctgtcagctttcctctgtacatgacctcatacggcctttgtttcacaagtatttccgcatcaaatgccctgatgcttgacagattcccgtcaaatttgtccatgtacagctgaacatacatcccgcctatcttgacggtgggacgggtattgatatcttcttcagaaaactcgaaccgatacgtgtttcccttgtcagtcacattgacaaaaggagaaacctgcgtcgttttaaaaacttcgcccgtcgattcgccgatcttaaacggttttgcgttgatgccgcttcctgaagcatataaagtcacggctttatcattcaaaataccgacttgtacgtattggtctttcccctggttgtacacccaccactcgtaatcgtaggcagaaggatctttccgggacggttccccaagtttctttttcacatcggcggcagatttccccatgagagaaagcagtccggatgacggcattttcagccgttttccgctctcttcttcattggaaacctgaggctcctcctgatccgtctttttctgaggagccgatccatattgtataaacagaacatacgctccgtaaataagcaaaaggataacgagagcccttgcgatatttttcaacctctcacccccatatgttcaaaccgttctgtttttgtttactcttatacagtacagcctatttgcatcgtccgtgatttatgtttaatggataaacccctccggaccgccgtcttcagaaatgtcagacagcgcccggcctgcttgctcatttgattgctcggccaacgaaagatcgccgagcgtaacaatgccgaccagttttttatcctttgtgacgggaattcttctgagctgatgttcagccatcaaatggagcacctcctccacagaggcgtcttcttctgcactgataacccgctctgtcattgcgtcggttattttttgagagttcggcttttttgaagcaattccccgtaatacgagatctctgtctgtcacgatcccgacaagggtcgcgccgtcttcatccactatcggaatggcgccgacatccgcgtctttcatcttcaccgcagcttcatatacattatctaatactgtacaatattgcaagtctgacgtcatgagcttattgatctttgtcattgcggaattcctcctttttctgctactattgtcgtcaaatttttctttttgcatactttcaccgtatgaatcattgaaagtgtaacgctttcatactatgattgtcaggaaagggcatttttaaaaggagggggaaggtttgaagtttgaaaacagcggtcttgaaggggtaacagcggagctcagccgcttgaatgatctgatggaaggtaaagggctcattctggctggacaatgggattatgaaagagtgacttacgacaaaaagttttcagtacctgaggggacattttatctgcggattcaaggaacggcaaaagagggcgatgtcggcggcagccgggccgtgattcagctgaaggcccctcttttaggaaagcattattatccgcacggcgtagaatacggcagcgctgaagaatttccggaacatgttgtcgctgaaagcaaagctttactgcttgaattggaagagtcattaaaaacagtgcaaatgtaataaaaaagtacagcatattctgctgtactttttttatgagacggtatgctcgatatacggcggctctgacagcgtatctttttcccgttccgttctgacccactgaaaaaagatgacagccaaatatgttccgtagaccgcctcttgaatgattttcatcagcactgccccaagctgctgatcttccagaggaggcagcgtgttaaacatctccggtccggataaagggatctcctccaacaagtctaaaggaacgcaaagcttcattgcttcggcccaagccgccggatctgtatacgtggcatacatgggcgccccgctgaacataatgagcgcgcaggccggcgttaacagaatcccgtctgccataatataccccagcttcattaaaccgctgagacggggcagaccgtccaccttatgcacaagcggccaccacataaaaaacgccgttacaaagatgagtccgttcatcagcgtgtgatacagcgaatccgttttgacgaaatcaaatataaacgggatgtgatacagtgaaaaaataccgttaaacagcactaatgcgataagcggcattgaaaagaacgaaaacagcggctttacgacaggacggaagatcagttttttccatgcccagccgggaattccggaaatcaacagcggcggtacgactaaaaacagaaccgccatctgcgtcatatgggcgctgaacatcacatggcccaataaatcaaccggacttcccgcagccgcgtaaaaaaacagcgcggaaagcacaaacagcaccttctccttagcggccacacgtcctttatgccggctgcaccagtaaaagtaaacacctgttatcacggcagttatacaaaacagatacgggctccacattgcgcgaaacccgaacatttctaaattaatcaaatctctcactccccgccgccccgattaccaccaaataatcgtgacaaatgcaagcacggtgataaacgcgacaaatattcccgaatacagaaataatgacggcgcttcatgccctttctggctcatatgcataaagtaaaacagctgaaagatgacctggatgaccgcaagcaggatcagaaacggcatcgtaaaccatccggcaatgccgtctgcagccaccgtcaaaaacgcgacaagcgtaagaccgatcatcaaaccgaaggatatgacctgatatttcatctcctcggcatttttctttttccgatattcgagatccgtactgacagtccctctgtttttgttatcgtccatcgttatcccaccatccccatcaaatatacaacggtaaagataaagacccacacgacatcgataaaatgccaatataagctggccacataatatttcggcgcattataaaggctgagccctcttttcgcattccggatcataagcgcgctgatccacaacagcccgaacgccacgtgtgctccgtgtgtgccgaccagcgtgtaaaacgcagagccgagcgcagagcttgtaatggtaaagccgaattcgtgagtgtaatgcataaattcatagatttctacccctaaaaatcctgctcccaataaaacggtaaccaaaagccacacctgcatttttttaaaggagaaatttttcatatgatacatcgcatacacactcgttaagctgctcgttaaaagaagcatcgtcgcgataaacacgatcggcagctcaaacatctcagccgttgacggccctccggctttagattcccgtaaagcaagaaatgtcgcaaatagcgaggcgaacagaaccgtttcgccgccgagaaacagccaaaatcccaaaaacttatttttcccctccagcgttgctttttcaggagaagccggaaaggtttcagccgtcattttttcctgcagctgcattacgccttcacccctttatcatcattcggcagatcttctttgtgaatatgatagccgtaatcatcgaccacagagcgaagcagcatggtaaagaatgtgatgccgagccctatgaagataaccggaagcccccatgaataatcggagtggtataaaaacccaaacgctgcgacaaacagcccgaaagatatgataaacggcatgatggagccgttcggcatatgaatgtcctctacaggctctgcaggcgccatcccttcatttccggcctgcttttcaatccacagcgggtcaagtccccggacaaacggaagctgtttaaaattatattccggcggcggcgaagagaccgcccattcaagcgtacgaccgtccagccacgggtcgttcccgacgtatttcccctttattgaggtataaataatattgaccacgagtaaagcagccgcgcccgccatgaaaaacgcgccgattgaactgatcaggttgccggtatcaagaccctggccgggcagatatgtgtaaacgcgccgcggcattcccatcaagccgaggaaatgctgaatgaagaaggtaagatgaaacccgataaaaaataagacgaacgaaatttttcccatcgtttcatgaagcaccttcccgaacattttcggccaccagaaatgcacgcccgccaggatgccgaacacaacgccgccgataatgacatagtggaaatgcgctacgacaaaatacgtatcatggaactgataatctgccgctgcggccgccagcatgacacccgtgactcctccgagtacgaaagaaggaataaaggcgacggcatacagcataggcgtcgtgaatttgacatttcctccccagatggtcaaaagccagttgaaaattttaatgcccgtaggcaccgcgatcgccatcgtcgcaaccgcaaatattgcattagcgatcggtccgagtcccgtcgtaaacatgtggtgaacccaaaccatgaacccgagaaagccgatcagcacgatcgcaaagaccatagacgaataaccgaacagacgtttcctcgcaaatacgggaatgatttctgaaaaaatcccaaaggcgggaagaattaaaatgtatacttccggatgcccgaaaatccaaaacagatgctcccagattatcgtattgccgcccaattcaggattaaagaaattcgttccgaacaaacgatccagcatcatcagcgccaaaccgacggtgagcggaggaaatgcgaataaaatgagtgccgacgccacaaatgtcgtccacgtaaacagcggcaatctcatatacgtcaaacccggcgccctcatattaataatcgtggcgagaaaattgatccccgcaatcagcgtacctaagcctgatatttgcaggccgagcacgaaaaagtctatgccgtgccctttcgaattcagcgcaagcgacgcgtacgacgtccatcctgcatcaggagcgccccctaaaaaccagctcagattcaaaaagatgcctccgaagaaaaacagccaaaatccgagcgcattcagaaatgggaacgatacgtcacgcgccccgatctgcagcggcacaaccgcgttcatcagcccgaataacagcggcatcgccgccaggaagatcattgtcgtgccgtgcatcgtcataatttcattaaactgctgcgcacccataaaatcgttccccggcctcaagagctgaatcctgataagcatggcctcaagtccgccgacgacgaagaaaaatcccccggcgatcatatataaaatcgcgattttcttatggtcaaccgtcgtcaaataatcccaaagcaaagagctttttctttgctgtcctgtaagcgtattcatcatttgcgacctcccccctgatatctccctgtcctcacttgttctccgctttcagcccttttaaatattcatacagcgcatccgtttcagcgtccgagagcttcggataagtgcctgtcattttattgcccggtttaatgctgtccggatttttcagccaggcttttatattctctttattcgcatccttaatgccggccactttgacccgttcaccgaaggtagcgaggttcggagccgttcttgccgcttcagcccgtttatcattgggctcaaccgcatgacagctcaggcagtttttttccttaaacagctcttctccttgcgcggctaaaccggaatctgttgtatgcttataatttttcatcgctttcgtccattgtttaaattcttttgacggcagcggcttcactttgaaatccatcagcgcatgtgaaggtccgcacagctctgcgcatttcccgaagaaatattctcccgcttctttgctgcgtttagaatcgaaggtcagaaagaaagtattgtcattatccgtattcgtatcgatttttcccccggctgacggaatccagaaagagtgtttcacatctgaggacttcagcttgaaatagacgcgttcatctgtgggaacgatcagctcctgacttgtcacaaacccgtaatcaggatactcgaattcccaccagtataaattcgcccttacattaataacgagcgcatcctctgctttacggtttttcttatccatcggcgacgtatccgccagcgccaatgtgtcgatgacaaccggaatgacaagaataatcagaagcaggatcggaataacggtccaagtgatttctaaaaaacggttcccctccacctgtttcggtatcgtgtcttcccctatacgcgaccgtctgaatctcacaatgacgtaaaagaaaataactgctacgaccgcaacgacgacaaccatgataagtgtgctgagcaccgtcagatcatattgtttatcagccacttcgccggcaggcttgagtgtggacagaaacggttttccacagccgctcaataaaagcggcactaaggctaataatgataaaagacgccaacgctttaacatttcacccaaccccttttttgaatcagtacgagatgcacaagcagtaaatctgcttccagccgaaatacttcttttcctcatttcttaaaatatgagattttttacttaaaattccatctatgtataaaagcaaagccgcctgattaaacaaaaggtcaaggcggcgtttactagttgtcattgtttgttttggcgatcaaacaagctcattattcaattaaaacagcgtaaagaccaccatcgctacaaaataaatggtcatgtaattaagcgaataaacaaacataagagttgcccacttcatgatgtttttcatacggaatcccatcagtccgagaataagccatccgacattcagcaaagtgccgagaatgacgatcggaagaccgagactgccgaggaaaaacggaagcggcagcaggcatgcgacccagacgataatctgtcttttcgtcacttcaaagccgtgcactaccggaagcatcggaatattcgctgctctgtaatcttccgtcttcttaatcgcaagcgctaaaaagtgcggaatctgccagatgaataaaatcatgaataaaacccacgcgacaacaccgatgtgcccttcaaccgctgtccagccgattaacggcggcacggcgcctgatacacttccgacaaccgtattaatcgtataacggcgtttcgtccacattgtataaagaacaacgtacgtaaacacgccgataaaaccgatgactgctgccatcacggtggtcatcaaaagcatgataagtcctaaagcaatgagtaaaattcctgaccacagcgcttgattcggctgaatctttccggttaccgtcggccttactttcgtgcgttccattaaatgatcaatatcacggtcgtaatagttgttaaccgcacaagaaccggcgatgatcaaagaagatcctattaatgtaagaagcacggtgtttaaattgcctaaaaaactcagaccggatatatgtaacgcaagccacatgccggtaaaagtcgtaattaaattcgaattgacgattcctattttgataagcgaaaggaaatccttccatgccgtcgtctcttcaatctgtccgtctatagctgtatcgtttaaaattctggaattagccataacgtaaacctcccttacaaacctaaagcaggttttttaagacctgcaactctatcatacaagataatgacctgtaaaaaaacatcctcttaaatattaaacgagaaacaggaatttatttgtgaactttttatgaattttaccaaatccgccggtttcataataaagcggttactttatttctatcagacccatctggaataatcaaccccattatctaagaagtcctgattctattatatttttgtgaacaaacagaattgagaattgccacaaaacacatattcgcttacacttggtacgtatatcattttgtccagtttgttaagaaggtgaatgtaaaatgaataaagctttgaaagcgctcggcgtgctgacgacattcgttatgctcgtcgtgctgatcggcggcgctcttgtcacaaaaacaggatcgggtctcggatgcggaaggcagtggccgctttgccacggccggtttttcccggagcttaacgccgcttctatcattgaatggagccacagactcgcaagcggtgtctcaatcgttctcgtgctgagtctcgctttttgggcatggagaaaagtcacgcctgttttccgtgaaacaacctttctcgccattatgtccattatctttttatttttacaggcgcttctcggcgcattagcggttgttttcggatcaaatgcgctcgttatggcgcttcatttcggcatatcgctgatttctttcgcttctgttttgattttgacgctgctcatattcgaagctgataaatcagacaaaaagctcgtcaagccgctcagaatcggcaggaaaatgcagtttcatatgatcggcctttcgatttacacgtatatcgtcgtttatacgggggcttatgtgcgccatacgaaatcaagccttgcctgccctgacgttccgctttgcagcaggctgaatcacgggcttccgtcccattttcaggaatgggtgcagatgggccacagaacggcagcgctgcttctgttcgtatggattcttgtcgcttttgcacatgcggtgcgctcctacaaagaccaaaaacagattcttgggggctggatagcggctcttgcctttgttgtattacaggcgctctccggaatcatggttgtttattcagaaatggccaccggctttgcacttgcccattcgctctttattgccggcctgttcggcgtcttatgctatttcttattattaatcgcccgcttccgctatgaatcaaaacagcggtacatctgaggcacatgaaaaggccgaagcattagagcttcggtctttttacatctaaaaaacctgatcgcacacgagggcggatcaggtttttttatgttcattttttacgctttttcaatttcgatcagtaaatcgcctgtctgaatcggttcaccgtttttcacatgaatctgctgtatcgtcccggagaacggcgcctgtaccgtcgtctccattttcatcgcttcattaatcatcagatgatcgcctttattcacctttgccccggtttccgttaacaatttaatgacggttcccggcatggatgccgcaatgtggcttgggtttgtccgatctgcttttaatttttcctgtacggacgatttaatgctttcatctttaatgaccacctcgcgcggctggccgttcaattcgaaataaacgacacgtgtcgcatctggctgcggttcaccgatagatacaagcttcacgatcaacgtttttccgcgctcgatttccacttcgatttcttcaccgagtgtcatgccgtagaagaaagtcggtgtgtctaatacggaaatatcaccgaagcgttctgctgttttaacatattcagtaaacaccttcggataaagagcatacgcgattgcgtcctgatcactcaattccatctgatgcgtttctttccattcttctttaatggcttcaaaagataccggttcaagcagctcacccggtcttaccgtgatcggcgtctgtcctttcagaacgagcttttgcagtttttccggaaatccgccgtgcggctggccgatctgccctttaaagagctcaacgactgaatccggaaaatcaagcgtttcgcctttatcataaacatcttgttctgttaaattgttttgcaccatgtaaagcgccatatctccgacgactttggaagaaggtgttactttcacgacgtcgccgaacatgcggttgacgacgctgtacatgtctttcacctcattccagcgatcgcccaggccgactccttttgcctgctgctggagattgctgtactggccgcccggcatttcatgattataaatctcagtatgcggagacttcatcccgctttcaaattcactgtaatactgacggacggattcccaatattgtgacagtctttccacctggcggacatccatttcaggacggcggctgtttccttcaagcgcatgataaaatccgcttgcgctcggctgtgaagtcagacccgccattgagctgacggcgacatccacgatgtccacacccgcttcaacagctttggcatagagaaagacgccattgccgctcgtatcatgcgtatgaagatgaacgggaatatcaatcgtttccttcagcgctgagacaagttcatatgcggcttgaggtttcaaaagaccggccatgtctttaatgccgagaatgtgcgccccagacgcctcaagctctttcgccatagaaagataatattgcaaatcatatttcgtccgggtcttatcaagaatatctcccgtgtaacaaatcgcagcctccgccacttttccggtttcacggacggcatcgatggccagcgtcatcccttttacccagttcaggctgtcaaagatccggaatacgtcaataccggactccgctgactgccggacaaatttttggatgacattgtccggatagtttgtataaccgacggcatttgatgaacgaaggagcatctggaacaatgtgttcggcacttccttacgaagatcttcaaggcgtttccaagggtcttcttttaagaaacggtacgctacatcaaatgtcgcgcctccccacatttcaaggctgaacagttcaggccacagggcagccgtaggattcgcgatttttttcaaatcattggatctgatccgggttgcaagcagggactgatgggcatccctgaacgttgtatcggtcaggagcacggatttttgctctttcacccagtcagcaagcccctcggcgcctctttcatcaaggatctgtttcgtaccgcttgccggcttttccccgatacctaacgtaacggtctgaggcttatcaaatgcaggtttttcttttttcccgattcccggaaaaccgttcaccgtgacattgccgatataggaaagcatttttgttccgcggtccttctgttttgggaaaacaaacagctcaggcgttgtgtcgataaacgatgtgtcgtattggcccgtcaggaatttttcatgctttgccacgttttcaagaaacggaatattggtcttaatgcccctgatcctgaattcctgcaggttgcggaccattttcgctgatgcctgttcaaacgtcagcgcccatgtcgacagcttgacgagcagtgaatcataataaggcgtgatgacggcgccctggaagctgtttcccgtatcaaggcggacgccgaagccgccgcctgagcggtaagccataattttacccgtgtcaggcataaagtcattcagcggatcttcagtggtcacacgtgattgtatcgcatacccgtttgtaaaaatgtctttctgctcagggatattgacggcacggctgtgcagtccgtggccctgcgcgacgaggatttgcgtctgaacgatatcaacccccgttatcatttccgtaatcgtatgctccacttgcacgcgcgggttcacttcaataaagtaaaattcaccgcccgctacgagaaattccacggtccccgcgttgatatagccgacatttttcgcaagcgccacagccgcttgacagatttcgtcccttaattcaggctgcaaagatacactcggcgccacctcaatgactttttgatggcgtctctgaacggaacagtcccgctcatacagatggacgacattgccttctttatctccgatcacctgaacttcaatatgcttaggattttcgatcagtttttcaacatacacttcatcgtttccgaatgcggctttcgcttctgatttggcccgctcaaacgattctttcaattcgctttcgtttcggacgattctcattccgcgccctccgcctccgagcgatgctttaataataaacggaaatccgtggacttttgcgaattgttcgacatcttttaatgtttcagccggtccgtcactccccggaataacagggatgccggctttttctgcctgctccctcgcctttaccttatctccgaacatatccaaatgcgctgacgtcggtccgataaatacgatgccctcttcttcacagcgtctcgcaaattggatattttcagagagaaatccgtagcccggatgaatggcatctacgccgtttctttttgcgatctcaataatcccttcaatatcaagatacgcgtcaatcggttttttgccttctcccactagataagcttcatccgctttatagcgatgataggagcccgaatcttcttttgaataaacggctaccgttctgatgttcaattctgtgcacgcccggaaaatccggatcgcaatttctcccctgtttgctactaacactttttggatggattgttgtgacaaacttttctcccccttggcctaataaatatgtagtttataataaaggaatatccgtcctgtgtatacacttgttttttagagatacacagatttttccgtctgccgtctttttacccccttagacggaacgggctccctctttttcttcttttctgagtacttgacatgcatgctgacattcaccaatataccggcgctcgttaataacaaaaacattgatgatcccccgtagctgataaacggcagcggaacacctgtgatcggaattaaaccgctgacaccgccgagattgataaaggtctgaatcgcaatcatgctggatatcccgattgccaaaaggctcccgaacggatcttcacattttctcgcaatataaaaaccttttaacacgacaaaagccagcagcacaatgacaaacaggacgccgaaaatgccgagctcctctgaaataaccgccataataaagtctgtatgcgattctggcagataaccgtatttttgaatgctttctccaagaccgagaccgaaaaaaccgcctgagccgatcgcataatacgaatttataatctgcaggcctgatgtgctggcgtatttaaagggattttcaaggctttcaaaccggctcatacgcccgggtgtcaaaatatcgtcccatttcagatagatgatcgggctgacaaggagcaatacgattcccgccatgagaaccagcctgagcagggtccttccgctgaatcccgaacacataatgacgcaaaacgcgatcaggccgataatcatcgccgttccgaagtcaggctgaatggcgataagcgcacaaatgactacggtgacgatcaccggcggcgcaacccccgtcaaaagctgatcgatatagctttgtttctttgcgtataccgcggcaaggtacagtatcagggacagcttgacaaattcccccggctgaatggccattccgccgattttaaaccagctttgcgcgtttccggcaacatgtccgaaaacaaacagcgcgcaaagcgcagccactgacgcaagcagtatgaatttctgaatcttttgatgggcgaacactttgtacggaaaaacggccgcgatgataaacagcacaaaccccgcgatgacggcgaacagctgccgtttaaagaaatagtcgctgctcacgccgtaacgcataacggcggtaatcatgcttgagctgtataccattaccaatccgaaactgcacagcagaatgatagcgcatatcaatgaataatcgtaagattttaacattcttttaaacataacatcctctttcctgcttaaagcttacgtttaatacctattgcgtattatattttactataattcataaacattttacgcagtttctttatagtttttcggatgaaatgcagattaagagaccgtcttacgaaaagaagatgcaaaaaaacggtttacggttataaaaaaacccaaaccgttgaatagtttgagtttgatcatttattttcctgtaaacgcatcatgcaaagcagacagttctctttcaagtctgtccagcagctctttgccgtcgttttcgtcaactaatcccaggcggacagcaaaatcgatttccctcgacagtccgaacatctgagtatccaagacctcttcataaagaggacattgaggcatcgttaagttatccatttgtactcggatcagcttcaaaatcttctcagcatctaacttcaacagctcgaatgctttctgctgatggtcaactataatctctgaagccaaaagtatccctccgttccccaggcgagtacctaattcttctatttatcataaagggtatcagatgaaattgcaagaggatttaagcagatgttatgataaaaaatgtttcaaaaaatactcagcctgtatttctcagacatgatttccaaaagcttcacacccgcgatgctgttgcctttttcatcaagcgccgggccgaatataccgattccgaagttgtacggcgaaatgcccatgatccctcccgaaacgccgcttttagcgggaatgccgaccttaatcgcgaattccccgctcgcattgtacatgccgcatgtcaccataaacgtcttgcagattctcgccacatcttttttaatgacctgctccccggtttccggatgcttgccgtcaagggcgaatacgcagccgattttggctaaatccagactgctcatcttaattgcgcactgttttgtatacaaatccatgacctcttcaacatcgcctttaaaaatgtcatactgcttcatgtaataacacatggcccgattaatcatggatgaactgaattccgattccgcgacatgtctgcaatatgtaatgtcctgattattcgcaagtcttctgatgaatccgagcaggtaatccaggcggtctttcggcgaatgccctttaatgaaacccgtaacgacgagagcgcccgcattaatcatcggatttaaaggcttgcccggattcactgtttcaagcttaatcatggaattaaacgggtcgccggtcggctcctgacccacgcagctgaacaccttttcctttccgtaatccatcagtacgagcgccagagaaagcactttcgaaatgctctgcagcgtaaatgtccggtcggcgtctcctgccgtcagacatgtattttccgcatgataaattgtgaccgaaaggctgtcttgttcagattcagccagagccggaatatagtctgccactttgccttcttcggtcctttttttcgcttcttgaactaatgcgtccagctcttggtaatgccggcataccatgtcgatcatcctcacttcgctgccgttgtatacatctaatttgcgacgcaaagtgacaattcatgcgaaaacttttatactttaagtaaaggggggcttcaccatgagcgttattcaagtaaaaggcaatgttacatacccgattacaattgatccgagtgtctggattttcgatgaccgcaagtttccgtttgaaaaaaatcagcccgttcatccggacggctctgcagaaacccaggagcatacgcttgatccggaacgggtgatcagagaagggcgcatttcgccgccgactttaaaaagcgaaaaacgttatgaaaaagaaagactgatgaacggcagcttcgccatgaagctcggcgctgttttagcaaatgccgagccgaaagaaagcgctgtcctgtgcgcatttatttcaaaatcagaaagaaccgaagtgccgctcgaaaaggcgatggacgcaatcgcgcatttcagcgatggggggaaaccccttcaagacggcggcccggtccatttttacgtggacggagacttagaaaaaccgataacgggcgtcacagaaatcgaagttttataacaaatcggctgcaagctgtgcaaggccggatctctcacctttcacaagcttcacgctgccggagacggtttgttctttaaaccgttctacaacataagcaagtccgttgtttaaactgtctaagtatgggtgatctatttgctccggatcgcccatcaggacaattttgctgccctctcccacccgagtcaaaagcgttttgacctcgtgcctcgtcaaattctgagcctcatcaataataataaactgatccggaatgcttcttccccgaatgtatgtcagcgcctccacctgaatcgatccgattcctgccaaaatcgcttcaagttcacccggctttttcgcattgaataaaaattcaagattatcaaagatcggctgcatccacggcttgagcttttcctctttttcgcccggcaaatatccgatatcctttcccaccgggacgatgggacgcgcgacgatcagctttttataaataccgagatcctccgtctgcagaagccctgccgcgagagcaagcaaggtttttcccgttcccgcttttccgatcagggtgacaagcgggatatcttccctcagcaggagttcaagcgccattgtctgctgaacgttcttcggcctgataccccatacgtgctcatcatcgaaaacgagtctttttacggtctcgcctttcttatctgtcatgccaaccgcagacgaagatcctcctaattcatctttcatcagcacaaattgattcggataaacctgatgctgctgaagctccttgactgaaatttgtttgtctttataaaacgaggcaaaccgctctttattcataaatatatctttgtacccgctatatatttcatcatgatcaacgactctgtcgtttaaaaagtcctccgccaaaagcccgatggcatccgcctttaccctgacaagcacatctttgctgaccaggatgacgaggcggccgttttctttcgtttcctcctcaaggcttaaatttttcgccaccgccaaaatgcggttatcattcgttttttcgataaaaatttcttggagctggtgaaatgaccggtggttcagttcaattctgagcgttcctccgctttcaagcggaactttctcgtgcagccttcctttctccctgagcccgtctatcagcttagatacgtgcctcgcatttctcccgacctcgtccatataccgcttttttgaatcgacctcttccagcacgacggcggggatgacaacttcgttttcttcaaaggaaaaaatggcgttaggatcctgcaaaagtacattcgtatctaacacataaattttactcaagtctcagcctcctgaaataaggatcaaagcccatcgtgtgcttctctttccgcgaaaaacggggatgcctgctaaaatatatgatttggtgaataaagatagaaggttaattcaacaataaaataaatgaaagcattcaaggaggaaatctgacgtgcgaattcttttcattatcatacaagccttgtttatccttaccggctgcactgctgtacaggacggccgcggccgcaatattcagaacgaatcagccgatcagcgcgatgcaaaaccgatccatgtgaaaaatacggctcctgagacagctgaaaatcccggccggacagacatcgctaagcatctcgtcgaggtaaccgaaaaaatccccggcatttcagatgccaccgcggttgtactcggaagatactccgttgtcggtatcgatgtggatgacaatttagaaagaagcaaagtggagagcattaaatacacggttgcccaggcgttaaaaaacgatccttacggcgccaatgccgttgtcgtggctgatcctgatacggtttcccgtctgagaggcatgggcagcgacattaaggccggccgccccgtttcaggcattttggacgaacttgccgccatcgtcggccgtgtcatgccggaagtccctaatgatgtgaccgacaatgaaaaagaatcaccgactcaatcgaatgatgatcagctgaacgaaagagaccagaataagctgcagaacgaacagaacgatcaatcggatcatcatatgaaaaaccgccggtaaaaagcagcgcccgctccaaaggaagggcgctgctttctttccctttggcaggaggggcatccatgatataatgcttgtcatagtgaaagaggtgaaaaatcaatgagagtaaaatgttccatttgcgacaaaatcgaacaaattgatgatgaaacactgacagccaaacgcctccgcaatcgtccgattcatacatatatgtgccgggaatgccatgaccgaatcaaagtcaaaacggaggcgcggctgaataccggacacttttcctttcatcccggacaaaaagcgaaaaaagataaactgaaaaaataaaccgaataaaaaatgacccgccggaaggcaaggtcatttttttattgtggtttagctgactggctttttttggactggtgcagacggattttgtaaatgatcaaaatcaaggcggcaacaacaagcccttctccgaccggcagaaacacaccgaaaaaagtcagcacggtgcagccgagcacgagaaagagataaactgccgcagccttcaaaaccggcagccgtttggcaaagccgagtttaaatacaatcaccgaaagcacgacgatcgttccgtataacagccacattcccgtcagcggatgctcatccacttggtaaagagccgcaaagaacgacagccgttcacttacttcattcaaaaggatccccctccccttttccgttcgggttctaccttttcaaattctgcaagtgattaagacattcctgctgtttttttctttttcgccgctttttcacgttcgtttttattcaggattttctttcttaaacggatggattccggcgttacttcacagtattcatcttcgtttaagtactcgagtgattcttcaagcgacataatgcgcgctttcttaatcgtagtcgtttgatccttcgtagcggaacggacgtttgtctgctgtttcattttgcttacattgacgacaaggtcattgtcacggttatgttcgccgacaatcatgccttcatatacttctgttccgggctcaacgaagatgacgccgcggtcttcaataccttgaattccgtaagatgtcgcttttccgttttccatggaaacgagcacaccctgacgccggcctccgacttggcctttttgcatcggctgatagctgtcaaacgtgtggttcaggatcccgaaaccgcgtgtcagtgacagaaactcagtagaatagccgatgagtccgcgtgaaggtacggtaaagatcaggcggacctggccgtttccgttattaatcatatcaagcatttcgccttttctcgcacccattgattccataacagaaccggtatgctcttcaggcacatcaatctgcacgcgctcaacaggctcgcagcttacgccgtcgatttccttaatgataacttcaggtttagacacttgaagctcatagccttcacggcgcatgttttcaattaaaatggacaggtgaagctcaccgcgtcctgaaacaacccatgcgtcaggtgatgcagtcggttcgacacgaagactgacgtctgtttgaagctgcgcgttcagacgctcttcaattttgcgggctgtgacatatttgccttcacggcctgcaaacgggctgttgtttacgacaaatgtcatttggagcgtaggctcatcaatgcgcagaaccggcagcggctcatggtggtcagccggacaaaccgtttcaccgacgttgatgtcttccatgcccgaaacggcaacgaggtctcccgctctcgcttcttcaatttccacgcgtttcaatccttggaaaccgaagattttcgttacgcggaatgattttaccgttccgtcaagtttcatcaatgaaacctgctgacccactttcatcgtgccgcggaaaacgcgtccgataccgatacggccgacataatcattgtaatcaagcagcgccacttggaattgaagaggctcttcggcgttatctaccggggcagggacatgttcaagaatcgtttcatacagtgattccatattttcgtcctgctttttcggatccagacttgccgttccgttaatcgcagaagcgtagacgacagggaactcaagctgttgttcgtttgcgtcaagctcgatgaacaaatcaagcacttcatcaatgacttcttccgggcgggcgaaatcacggtcgattttgtttacgacgacaaccggatttaagttctgctcaagggcttttttcagtacgaaacgggtttgcggcatgcagccttcatatgcgtcaacgactaacagaacgccgtcaaccattttcataatccgttctacctctccgccgaagtcggcgtgtcccggagtgtccaaaatattaatgcgtgtatctttatagttaatcgcagtatttttcgcaagaattgtaataccgcgttcacgttcaagatcgtttgaatccattgcgcgttcggcaatattttcgttggcacggaatgttccggcttggtgaagcaattggtctaccaaagtcgttttcccatggtcaacgtgggcaataatcgcgatgttgcgaagatcgtttcgaagtttcacattttcatctcctaaaaaaattagataactttcatattataccacacatcctctttaaaagcgttacgtttttctgtaaactgaaagtatgacgttaaaggggatggaaatatgaaaaaattgaattggctcttattattatttgcattcgcagcagtcttcagcatgatgctgatcggcgtatcaatcgctgagaaaagcgcatggggcatcatcggaagcattgttctcgttatcgccatgatgggaagcggtttcaccgtaaagaaaaaaatgcgcgaacagggactgcttgattaaaagcatgaccctttgcaaaattccgtaaacatggaaagacaatatcttatgaagtctgaatcaaagattcaggcttttttatatcctcaaaacaggctccagatgtaaggcttatctcccccgccgcctagtcaggaagccggaaatgacagctcccactctagttacatcagcagattccctcagaaaatgaagtcagaaatagtccggcaccgttatgcagaaaataccatacctcctatatcaattccatcattgtctttttatacttgtggctgtaagcaaatacacatgacaaggagagaatgaaatgaaaacatcttttttgaagaaaaccgctgtaactgctgctgcaaccgcctcagccgccttgcttgcattcagtccgcttgattctgccggcgcaaaaacgatccaggtaaatgaaccgcatgccctggaggcttccgcagagaaaacaccggaagacgcggcaaaactcattgacatcatcagccaatcgatttacgaaaaagacggtgtctattattttgacggcgaaaaagcggttgaattgggattagatcaagaacaagcccagatcattcaaaagctgtgggacagttcaaccgaatttttaaccgttatttctcaatgtattgagaaaacggacggcgaatatacatttaataaagaaaaagcggtggagctcggctttacggaaaaagaggcccttatcgttgatcagctgttcaccgctttttcccaaagtcttcatatccttcaatctgcgctgattgaagaagacggtgtgtatacgtttgatcaggaccttgctgaaaaagcaggagcaggaaaaaaagaagcaaagctatgtgccggattctttaattcactgccccaggaattgcttgaaggcatttatacagcctttcatccggctgagtaaacggattaaaacgcccggtcattcagccgggcgtttttttaaatcagcagtttaaggaccagcatgataaagaaaacagcgccgaacaaacaggctgcttttatcagcagctttccgtaataccgttccttaaaccgcctttcttcttctgcataacaggatggcgccttcatctcagggctgccgaggtcaagcggctccttcatcatatgatataaactcccgcacttaccgcatgattcaagatggcgggaaataaaccgctccgtttctgtttcacaatcgccttcaatatataaagggagtaaatctctcactaaacagcaagtcatatctgtccgtccttccttttttcccccaagtgctgtttcagctgcattctcgccctgtacagggtgctcttcacctttgaaagactccagtccaaaacatcagcaatctcttcgtaagacagctcttgaaatacctgtcgaaatgctgaataaaatgactgaaaatctctgacatctgaaacaatccttttcgtttattaaggcctcacccatttagacaaacggctataaaaaaagttttacagatcggaacatttttcccctatcatttttcccgacttcatttgtcatttttttcagaataaatcgcatcattcgactcatgtctgattcaacacgtgcctctcggcttatcccccgatgccggccgccggaagcctttccgggacgattctatcaattcatcagcggagtctagttttatattgcagaatgagagaatgctggtttattataacaatataagttttcattattttcaaaaagggggatttattgtgggtttaggtaagaaattgtctgttgctgtcgccgcttcctttatgagtttaactatcagtcttccgggtgttcaggccgctgagaatcctcagcttaaagaaaacctgacgaactttgtgccgaagcattctttggtgcagtctgagttgccttcagtcagtgacaaagcaatcaagcaatacttgaaacaaaacggcaaagtcttcaaaggcaacccttctgagagactgaagctgattgaccacacgaccgatgatctcggctacaagcacttccgttatgtgcctgtcgttaacggtgtgcctgtgaaagactcgcaagtcattattcacgtcgataaatccaacaatgtctatgcgattaacggtgaattaaacaacgatgcttctgccaaaacggcaaacagcaaaaaattatctgcaaatcaggcgctggatcatgcttttaaagcaatcggcaaatcacctgaagccgtctctaacggcaacgttgcaaacaaaaacaaagccgagctgaaagcagcggccacaaaagacggtaaataccgcctcgcctatgatgtaaccatccgctacatcgaaccggaaccagctaactgggaagtaaccgttgatgcggagacagggaaagtcctgaaaaagcaaaacaaagtggagcatgccgctgcaaccggaacaggtacgactcttaaaggaaaaacggtctcattaaatatttcttctgaaagcggcaaatatgtaatgcgtgatctttctaaacctactggaacgcaaattattacgtacgatctgcaaaatcgacagtataacctgccgggcacgctcgtatcaagcactaccaaccagttcacaacttcttctcagcgcgctgccgttgatgcgcattacaatctcggcaaagtgtacgattatttctatcagacgtttaaacgcaacagttacgacaataaaggcggcaaaatcgtatcttccgttcattacggcagcaaatacaataacgcggcctggatcggcgaccaaatgatttacggtgacggtgacggctcattcttctcgcctctttccggttcaatggacgtaacggcccatgaaatgacacacggtgttacacaggaaacagccaacctgaactatgaaaatcagccgggcgctttaaatgaatccttctctgatgtattcggatacttcaacgatactgaggactgggatatcggtgaagatattacggtcagccagccggctctccgcagtttatccactccgacaaaatacggacagcccgatcattacaaaaattatcaaaaccttccgaacactgatgccggcgactacggcggcgtgcatacaaacagcggaattccgaacaaagccgcttacaacacgattacaaaaatcggcgtgaaaaaagcggagcagatttactatcgcgcactgacggtatatctcactccgtcatcaaactttaaagatgcaaaagcagctttgattcaatcagcgcgggacctttacggctctcaagacgctgcaagcgtagaagcggcctggaatgcggtcggcttgtaaacaaaaaaagagaccggagaaatccggtctcttttttatatctgaaacatttcacaatggcttcaccatgatcatatatgtcttttcccgatcgtctttttcaagcttaagctgttcaaagccgcattggcttaaaaacaaaacccattcctgcctgtccaggggaacggctgaaaacatcgctttatgctcccctctcagccggcccgcaatctcttcaatgaccgcgcgtccgattcctttctcttttgcctccggagcgacggccacggttccgagccacggttttccgtttgaaggcgcccattccaaatgaaaactgacggcggcaggagcgccgtcaatctcccatacgagccacgttccattgtacatggagtatgcaagcataaactccgccgcattttttgttccgaactcttcgtttttccacaccgggtgtgcagccgccagctgctccagaaacccgagatcttcttcttcaaaatctctacctgtcagcatgtaaatagtcgtcaaagataattttatgtattgccggattgcccgcaagcacgctgtggttgtctaaaaacgtaaacggttcgccatctgtggtcgtgtaaatgcccccgacttcgttcagcagcacgcagccggcagcgtaatcccacggcgcgagcctcatcgtaatgtatgcgtcaatgcggccggccgcaacactggcgagctcaagtgccgccgagccgtaggaccgcgttcctctgacccgttttacgagcggcgccaaaatactcgggtcaatccttctgttttccgtcacccatgtggcattgattgcaataatggcttcttcaatggaagcttcttttaaaggagcaagcggcgtgtcgttcagataagccccttttccgctgaatgcgtgatacagttcgtcctgcatcacatcataaattaagccgattttgccttttccgtcttcaaagatgccgatggagatcgcgaaatgccgcttttgatggacaaaattcatcgtcccgtcaatcggatcaatgatccagacgattccgtcaagggagcggagcttatctccctgcccttcttctccgagaatccggtgtccgggaaaagttccctgtatacggtcaatgaaaaagcgttccgtctctttatcaatatttgtgactaaatcattcggatttgattttgtttcaatcgtcaagctttcctgcatggattgtctgattctcgttccggcttcttttacccattgttttgcgatatcatcaatttccgtccaatttgtcataccgtgtacctcttttctatgtatagcttattctatagcatactgataaaggcgatgaaaaagcaaggaaaatgaaaaaaatgccttctcacgtaaaaacgaaccatttcctgcggttcgtttttactattctttatccgttaagccgaatccactcttttctgagacgttccagttttcttttgctgagatcgatttgatcttcattctctttttgcatggcctcatacagggttgccaattcataatcaacctctagtctccagacagctacacggttatttttttcctccctgaatccttccttcaccacttgcctcattgtctttcgccccttccagagatcatttgttaaaaaagcatcccatttttccaatttattaatgatacttcttatatcgtatggaaacttatattcggctgtaacaacattcttaaaattgtgtgtttacctattcgttttttaccccaatcctctcggctcaaacgttctcaatgtttttgcggccggcggcggctgtggtaaaatatgaatacttacgataaggaggaaaaagatgactcagatgcgttttacaaaagaagacttcgatacatttacaatagaaggtttagatccgcgcatggaggtgttaaaagaacaagtccgtccgaagctgaccttgttaggagagcatttcgcaccgacattgtcagcattgacaggcgatgaaatgttcccgcatgtcgccaagcacgcgagaagatctgtcaacccgccggctgacagctgggttgcctttgccaacagcaaacgcgggtataagaaactccctcactttcagatcggtttatgggacacccatatgtttgtatggtttgccatcatttatgaatctccgataaaagaggaatacggcagattgctggaagcgaagcaggaggacatcacaaaacagattcccggtcattttgtatggtcgccggatcatacgaagccaggtgcgtacaagcagtccgagatgggtcaggagcagctgaaaacattatttgaacgcctgcagacagtgaaaaaagcagagcttttgtgcggcattcagctgcaaaaagaagacgtgatcaacatgaacaacaatgaattcctgcaaaccattgaagacgcttttaggaagctttcctttttatacacactgactcagaaagtctcataacataaaaagcgggccgattgccggctcgctttgtctacattttgataatcgcttgatctgattgtttcgcctgtttcacagtcctatacggggaataggtgctgtcagcttcaaattggctgcagattttcttttcttccgctttcccgggaacgatttctttaaagcggcggtacgcattcagaagtctgtctcggtcagctcctttttcataggcgttttccacctgctgaaaaaaagcaatgacatccacggcctcctctgtcgtccagtcctcattcatcggatattgatattccaaatgtcttcactcctttataatcatgctcaaaataagcatcttccatagatcataaattgttctttactttctttcaagttcataatataattcatttgttttacgtttaaaaaacgggtaataaaactgaatgtaatacaaactaatccgtaggtattatgataaaggtgggaaaacaattgccgcaacatgaaacacccctgtacagcggactgaaaaagcacgcggacagacagcctgtccaattccacattccgggccataaaaaaggcgcgggaatggacccggaattcagacaatttatcggagaaaacgcgttaagcatagatttaattaatatcgaacctctggatgatttacatgcgccaaagggcattattaaagaagcccaggatctggccgctcgagcattcggcgcagaccataccttcttttccgtacaagggacgagcggcgccattatgacgatggtcatggccgtatgcggacccggagataaaatcatcatcccgagaaacgttcataaatccattatgtcggccattgtattttccggagcggtgccgatttttatacacccggaaattgacgatgagctcggaatttctcacggcattacgcttgagtccgccgagcgggctttgacggagcaccctgacgcaaaaggcctgcttgtcataaatccgacgtacttcggtgtggcagcggacttgagcagcattgtaaagctcgcgcattctttcgatgtgcctgtgcttgtcgatgaagcgcacggcgtgcatattcattttcatgataagcttcctctgtccgccatgcaggcgggcgctgatatggcagccacaagcgtgcacaaattgggaggctccctgacgcagagctccattttaaatgtgagagaaggccttgtttccaaagaaagagtacagtcgattttaagcatgctgacgacaacgtcaacatcctatctgcttctcgcttcactggatgtcgcaagaaaacgcctcgctacagaaggccgcgatcttcttgaagatacgattctgctggcggatcagacacgggaacgcctcaatcaaattgaaggcatccgctgtgtcggcgaagaaatcacagggtctaaagctgccttcagttatgatccgactaaattaatcatttcggtcaaaaacctcggcctgacgggtcatgacgttgaaaaatggctccgcgaatcatataatatcgaagtcgagctgtccgatttgtataatattttatgtattttcacccccggagacagagcaggagatgccgaccgtcttgtaagcgcgcttacagacatttcaaagcaggcttccgccaatgactatgctcatcagcaaaccgaagttctgcttcctgaaattcctctgttagcgatgacgccaagagacgcgttttacgcaaatacggaagtcattccgttaaaagaatccgcgggacggatcatcgcagagtttgtcatggtatacccgccgggaattccgatctttattccgggtgagattattactgaagaaaatatcagctacatttttaaaaacttggacgccggccttcctgtgcagggtcccgaagatgcaacgcttgaaatgatcagagtcatcaaagagcaaaaagccatccaataaatataaagaagcccgaaacgaaatcgtttcgggcctttttacgctttttactcttcttcaagatgacactggcattgtccgcagcatgttccgtataacgtcgtgaccttctcatcctcaaagtaatgaatcgcttcgttacagtcttggcaaacaattgtacccatctgtcattccccatttctcagaatttgaaaacgcttaatttttacttgttgttattatattattatgtcacatttaatatgtcaactgataaattgtataacacatttattttttacggtctttttatagctcgagggtcaatcacggtatatcctttatgacgcaatccttttacaatgtccggcatggcttcagccgtccatttccggtcatgcatcaatatgttggccccgtcccgcagataaggactgctcagtgtgatatcggtaagcgcttttttggattgatatttctgatcccaatcatacccgaaggtccagttcattttcaccataccttctttttttataagtctgtcactgtagtccgtattgcttccgaaaggcgccctgaaaaatgcgggtttctctcctattaccttttcaaccgctttattgacgctaatgatttcttcccgttgtttttgttcggaaagatcttttaagttttgatgagtcattgtatgattaccgatcataaaacctaactcatgaatatgcttaagcgctttcttattttcatcttttttcaaaaaatgtccgtttacaaaaaagatcgctgacgcattgagatcgtgcagtttgtccgcaatctcagcggcatgctgatcaggcgcgtcatcgatcgttaccaatgcgatcggttttttctctttctgttcatccattttttccacagaaaagcttttcggattgatatagtaacggggctccgccttctgttttttctgtttttcctcttttgtatggtggttttcccgtttggcatgattggccgcggcttgagaatggggtttgtttgtttgcatcttttcatttggttggcagccggcgagtaagcacatacatatgacagctgcagcggctttatacatgacaatccctcctgatatggttttgctcccagtataacgaaaaaacagcgctctcacgaaaaacaatgtgccttttttacacatcggctgcgcaagttgtcacacgtattatttcttcattaaaaacagtttcaattatataacaattcagtaacaagccttaggtttttcacctctcgtgatacacttgatatagtccttataaatggatgaacccatatattatataaaacagaggagtaagatagatgcgctaccgtacggtgattcccttttttttaatgctgttcgttctgtcaagctgttcggtttctactgtcagtccattcacaaaaaaccggatcgacagcattcatcacactcaaatcttgtttttttccgatgaaaatcatatagataaagaagtgccttattacgatgcgatccttgatttagaaaagaaatatccccatcatgtcgatcaaatgaaggtttatgacaacagaaagggatgggaagaggaaatcaacacgttccctgcgctgatggtgatcaatcatcggcatgtggtcatgaagattgagggatccgtaaagaaaaaagaggatatcatcaagcctatgcagcatgtgcttgcacaataaaaacagcccccgcttttacaaacgggggctgtttctttgttacattattattttacgatatggatcgggcttccgattgctacttcggcagcttccatagtgatttcgcccaatgtcgggtgagcgtgaattgtcattgcgatatcttcagcagtcattccgccttcgatcgccaggctcaattcagaaatcatgtcagaagcgcttgcgccggcaatttgcgcaccgattacaagaccgtcttctttacgagtgatcagcttcatgaagccgtcagtttcgttaagagacagcgcacgtccgtttgctgcaaacgggaacttagctgcaacgacttcaatgccttcttctttcgcctgtgcttcagtgtaaccgacagaagccagttcaggctcagagaatacaaccgccggaataccgaggtaatcgatttcagccggctctcctgaaatagcttcggcagcgattttaccttcgtaagacgctttgtgagccagtggaggtccgtcaatgatgtcaccgattgcgtaaatgttcggtacgtttgtgcggcactgcttgtctgttttaatgacaccgcggtcagtcatttcgataccgacttgctcaaggccgagctcatcagtgttcggacggcgtccgacagtgattaatacgtaatcagcatcaaccgttttttcttcgccttttacttcgaatgtaactgttacgccgtcaggtctttcctcaacgcctttagccatggcgcttgtatggatttcaacgttgccttttttcttcagtctgcgggtaacgagagaactcatttgtttttcgaagccaggaagaatttcatctccgccttctaaaataaccaattcagttccgaagttcgcatacgctgttccaagctcagtaccgatatatccgccgccgataacaacgagctttttcggaatttctttaagcgcaagtgcgcctgtagagttcagaacgcgttcgctatatttgaagtttggcaattcgatagggcgagaaccggtagcaatgattgcgtttttaaatgtgtatgtttgcgcagagttctcatccattacgcggacagagttgctgtctacgaaataagcttccccttttataacgtccactttatttccttttaaaagacctgcaacaccgccggtaagcttatttacaacagaagctttccattcttggacttttgtaaagtcaaccgttacgttctcagcagtgattcccatgtcatctgaatgttttgcattctcgtaacgatggcctgcattgatgagcgcttttgaaggaatacagccgacgttcagacaaacgcctccaagagttgctttttcaacgactgttactttttgtccaagctgagcagcgcggatggcagctacatagccgccgggtcccgcaccaatcacaagagtatctgtttcaatagggaaatctcctactaccataacattacgcctccattaaaataagttgtggatcgttcagtaaacgcttgatgtggtttaacgcattttgtgcagttgctccgtcaatcatacggtggtcaaagctgagagaaagagctaagacaggagcagctacaatttcaccgtcacggacgattgctttttcagcaatacggccgataccgagaatcgcaacctctggatggttgataaccggtgtgaaccattggcctccggcagaaccgatatttgtgatcgtgcaagaagcgcctttcatttccgcaggtgcaagcttgccttcacgcgcttttgtagcaaggctgttgatttcatcagagatttcgaaaacggctttacggtcggcatttttcactaccggcacaagcaggcctttttcggtatccgctgcaattccgatgttgaagtaatgtttttggatcacttcatctgttttatcatcaatagatgtgtttaaaacagggaattttttcaaagcggatgttaatgctttgacgacgtaaggcagataagtcagcttgatgccttgatcagcagcaacttgtttgaactgtttgcggtgagcaacaagatttgttacgtcaacttcatccataagagttacgtgcggtgcagtatgcttagagttcaccattgctttcgcgatcgctttacggataccgctcattttttcgcgtgtttcagggaattcaccttcaggagcctgagccgctgcaggtttagctgtttcctgaggtgcagctgtttcttgcggtgccgcttcttgagccgctcctccatttgcaaagctgtcgatatcttcttttacaacacgtccgttattgcctgaacctgttactttacggatatccacgcctttttcacgggcatatttgcgtacggaaggcatggcgatcacgcgtttgttcggatcagcttccacttggtcctgctgtcctgcgccggtttcttttgcaggctctttaggagtctcttctttagagatatcctgccctgcttcagcagacgactgaacttgagcttcagttttcgcatctcctgaatcatggcttcctttaaattgaagatcttcgtaaccaggtgcgtcaaacgtaataatcgtttgtccaacagttgcaactgttccctcttcaacttttaattctaatacttttcctttaacaggtgaaggaatttctaccactgctttatcattttgcacttcagccagaacatcgtcttcttctacctcgtcgttcggcttaacaaaccattttacgatttcgccttcgtggataccttccccgatatccggaagtttaaattcaaatgccacagttttcgacctcctagttgattaagcaaattttagttatgcattcgcaagcattgaacctagtaaacagattccttcatataagagaaaaggactctctttaccgtcttttatgacgcctgattaaaattcaagaacttttttcgcagtttcaagaacgtctttatggtttggaagccatacgctctcagcaagcgagaaaggaaatactgtatcaggcgccgcaacacgcagaaccggagcttccaggctcagaatcgcgcggtcattgatttcagctacaacgttggcagcgatgccggcttgtttttgagcttcttgcacgacaattgcgcggcctgttttttcaacagaagcaataatcgtatcaatatcaagcggacttacagtgcgaaggtcgataacttcagcagaaacgccttctttttcaagctcttcagcagccttaagcgactcatgaaccatcgcgccgtatgtgatgatagaaaggtcagtaccttcgcgtttcacatcagctttgcctagctcgattgtgtattcctcctcaggaacttcctgacggaaagaacggtaaagtttcatatgctctaagaaaacaaccggatcattgtctctgatagaggcaatcagcagtccttttgcatcgtaaggagtggatgggataacaactttaatacccggctgctgagcgataaggccttccaaactgtcagcgtgaagttcaggtgtatgaacccctccgccgaatggagagcggattgtcaccggagaagtccagcgtccgccggaacggtagcggagacgagccatttgtcctgagattgaatccattacttcatatacgaatccgaagaattggatttccataacaggacggtaatcttgcaggcctaaaccgagagcgagaccgccgataccggattcagcaagcggcgtgtcaaatacgcggtcctcaccgaattctttttgaaggccttcagttgcacggaatacgcctccggcaacgcctacatcttccccgaaaagcagaacgttttcattgtttttcagttctgtgcgtaacgcatcagtgatcgcttgaatcattgtcatttgcgccatggcttacttcgactccttcgctttgtaaatttcaagttgttctttcaagttgaacgtcggctcttcaaacatattctcaatcagctctgttactttcggttttgattcgccgtcagcctttttgatagcttgtttgatttcttctttggcctgttcaattactttgttctcttcttcttcagaccatagtcctttgttttccaagaacttgcggaaacgtacgagcgggtctttttgctcccattcattttctatttctttcgtacgatatttagtcggatcgtcaccggacattgtatgaggtccgtaacggaatgtaagagtttcaatcagagtcggaccttcaccgttaattgcgcgctggcgtgcttctgcggttgcagcgtaaacggcaagtgcatccattccgtctacttgaacacctgtaataccgacggcaactgctttttgggcaattgtctgtgcggatgattgcttctctacaggagttgaaatcgcatagcggttattctgaacaacgaagatcgctggcgctttaaatgctccggcaaagttcattccttcatagaagtcaccttgagaagctccgccgtcaccagtgtaagtaatagctaccgcttttttaccgcgctttttaagacctaaagctacacctgcggtttggataatttgagcaccaataataatttgaggtgataaagcatttactccctcaggcatctgattacctttaaaatggcctcttgagaacaggaatgcctgatgtaaaggaagaccgtgccaaatcagctgaggaacgtcacgataacccggaaggataaagtcgtcctgttcaagcgcgaagtgtgatgcaatttgagaagcttcctggcccgctgtcggtgcatagaaacctaaacgtccttgacgggaaagagaaattgaacgctggtctaaaatgcggatatacaccattcttctcattaattcctttaactgatcatctgaaagatcaggcattgcgtctttatttacgacttctccttcagcatttaaaatttggaacgtttcaaactgcttattaatagcatcaaattgttttttgctatcaacaattgaagtttttgtctttgcagccattttttaaaccacctcttcttttgatttaacagggttaggataccgtttagccatccgtattaaaaacagtcttatcatgctctgcaattctaaaattaatcattcagaaattcacatagcgcttaagcaaagataatgacgtttaaactgtactaataaaaaaagattttttattagtacaatatgatcaacaaccatagtttacagtaattaaacaaagccgtcaattatttataacgtcattttgaaaccgcttataaaacataagatcatattacgccaaactgtactataaaagactttaaactgtattataaaaatgctctactgtactataattaaaaaaaattacaaagagtaaattaagttatttaacttaggggcgggctttgaaaagataccgcgggctaaaaacgggcagttagcaatcgtcccgcctgccgaacagacgggacgacgcttttgtcaattattcaatacccgcccacacgatattcagcggcgtcagcacggcatgaggatgaaactcggaaatcggagtgaaaaatacatacgtaaaatcttcggctggatcagaaaacatgccgcaccaccccattccaagatgtgagaaggtgccttctgtcatgaaataatggtcaccggccggccacaaattaatgcctaaaccaaagccgccttcctctctgggcgctccgaagaagtaaaaaggaagaccgggctttatttgatttctcagcatcgcctcgactgtttttcttccaagcagcttcttatctttcaatctgcctttatttctaaacatttcagctaacttccaaatatctcgcaacgaagagtacagaccgcttgtcgctttattcggaaaatacgggtgatgacttttttccagctgtacgcactcgtgctcattgatcacacaaacttcttcttttaaagcatcaggcacataaaaatacgttctttctaatccgagcgcttcaataatatgctttgttacatactgttcgtaggatacgcctgttacttttgaaataatgatgccaagtataacaaagccggttctggaatagttccatgcttcatccactccgtactccaaaggcgtactgaccagatagtttatccattcttcctcattcgttaagtcaatgccttcagccttttgaatatccagctcaaaacttaatcccgccgtatgagtcaaaaggtgcaaaattttaatttctccgaaacccggtttatcaaacgcaggcaaaatgagcttgaccggcattttcagatcgagcaaacctttttcgacgagctgcatgacggctacagcggtaaacacttttgtcaaagaaccgatttctctgattgtatcaagctgaaatgtttgcttttctttttgtccgccggtaaattcccctaacgactcagctgcaaaaacctcacctcctcttgacatcatataactcgcacattgcagaactccattgtctatcatcgtctgataatggctgttaagagcgttaatttgtttcatatcaaatgccggattgcttattgtttgtttcattgttttctccccctgtactgtatgtatcgttttcatcccttacttactgatttcttgatgaattctgacaccgctttattaaattcttccggatgtgtgatgttcggaagatgccccgctcccttaattttctttaattctgcattgctcagcagtttctgcagcctttttgtttctttctgatcaactacgctttccttctcacccgtaaggataagcgttcttgtatgaatgtcttttaaaaagccgatcgtagaatagccttcttgttgatgtatcttcataaaacgttcaatagaagcatttaaaaattgattactgtataaactttcatattcatgcgattttcctatagctataaaatcatttttcagtttttcctcgacactgctttcagggtcttcttcgtattcggtgtaacttccggaaagaatgagtgtttttactttttcagggtattcataggctatcctctgccctatcatgcctccccaagaagctgccgcaatgtggatcggccacgcaacccctatctcgttcagcacttcgataaaagtctgagccagcccgctcagtgtaaaatcggcgctcccctcactcagcccgtaacccggtgtgtgtatgacaattacattaaattgatctgcccactctttcatttgttctttccacatgtaagcagtggtagcaaaaccgcaaatcagtaaaattgtttcacccttaccgctcatcaatatttccatatgccgggcattttctgtgtttgccagaaaatgaacggtttccgtttcttctgtctggtaaaaagcgatgagtttttttgcggcatcgctttgattgtgctgaagggctcctttcttcagtctgctccaataatgcaaataatcgtcgagatgacgattggaagccgtgccgagtatccggaaaggactttcagcttccgtaacgattgacgaagcatcaaaatcggctgcaatcgctgaatctcttaccagaggcggtgctgaacgggcggataacggcttgaaatcgttttgtattttttctttttctccgtataacacgatcagctggtggccttggccgagaagcgagtgttcaaaagctttgattccggcagtattttctaatgggtgaagtccgtactcccttttcataatatcttggatgccgggatcaactgacatgcctccgtctttccagaaaggccaatttacagcgatggtttttcctgatcttccccccgcctttctcatacattccctccactcggcaaaatgctccagaaaacgattggcgtaggcataatcggcttgacccagacttccgatttctgaggagatggaagaaaacaaaacaaaaaagtctaaaggcatatctctgagcgcttcatccaaatgaatcacaccattgacctttgattgcagcaccgcttgagcttccgcgtctgttttgttcataatgagagagtcttttaacacgcctgcactgtaaatgaccccgttgatttcggaataatcagcacgaattttttccgctaacttgatgacctgctgcttatctgacatgtcagcctggatataagaaatgcttgccccgtcatatcggatgctgtctaatttttcttccatgtctgctgtcattttcgatcgcccggcaatgataacgctggctccgtgatttgcataaagaaacgctgaaataatccagccgatgccgcttaaccctccgatgatgagatacaccccgttttttgcaaactttgcggccttttgtcctgtttgcagcgaagcgtctctatatgctgtcacccaccttttttgatcgccgtcatatttcacagcccgatgatgtccggcacttaattcattgagaagcaaaggtgctttttcaatggtttgtcttgaagaaatctcaaccgttttacactttatattcggctgctccgcattcagcgttttaaaaaagcctccaatcgcggcgtaaaccggatttgtatattgatccttgtcatgtacgtacagaatgttgatgttttcttttgttttttgacggatcaaagctttacttaaataaaggattgaataaaagctgtgagtcaggtctaacgccgcttcagtataagctttttttgacaggtaatgaatgattgacgccggaaacgctccggactttttcatatcatctaacagtctggtgtaatgagcagactgctccgggttaaatttataatgcttttcatttaccatttcatattcagcggcggcttccgcataaataacattttcactgccggtgtagttgcggatttcatcactcaatgaactgtcgaaatcgaaaatcaaagtattttccttagacacttctccggactttaatggcgactcaatccattctttttgtaaatacaaagattcaagcatcggcttttcagacggctctttcgtttgcgttttttctttaaaagctgcagccggtgtattacgcacatcatatttttcttctaaataagccgctaaatcatgaatattgttataatcaaaaagcaatgtcggatacaattgtgtatccaatctttcctcgagcattttcgatatatgcagcagctgttttgagtcaagacccagttcgtaaaaagattggtgtttgtccgctttatttggcggtgtgtttgtaacctctccaataatggatgacagctcatctgttaatgttttatgactgtcttggtgctgaactgtatcagagatagagtctgtcatgtcggctccgtatttctcctgcagatattccgtcaattcaccgattgtggagtaatcaaataataaagtcgggtacagctttgaacctaacatcagttctaactttttggataagtctaataattgtttagaatccaagcccatctcataaaaggaaatatcattcttcactgtttcagcaggtttttcaatcatgccggctatctcttggatcaaattatttctgattatttctttatttttcgttgcgctgccgacctctttagctttttgggaatgctccagcctttgtattgaattttcatttctgactcttttcacaccgaatcgctcataataaaaagcaagctctccatcaggcctgtatacttctatgtccgcatataaaatgtctttagaaggcggctgcgttatactggttttattaatatacacaaaacaagacccagttgttttatgcagtgcccggaatgtctcaatatatatagggataaacgcatttgttccttcatccggcaagtctgatgtaaggattcccaacaagctgagagacccatccaaaaatgcgggatgcatgtaaaagtcatctgtatattcttttgaaagtccgcttaaactgacctctcccagaatataattttcaccttcatataccgtaccttccaatttcataaaatctttatgaatcaggccgcccctgcgcaaattacgataggcggattcagcatccgaagtccggacggcccctttctttaattcttcgattgaaattgtcttttcgtttatcgcattttttcttatgatttccgcctgcaagttgactgacgcttcaccttccgctttttcagcgacccatttcctgcttgttgtttcaacaagccagccgttttcttgttccgtaaactggaaggtgacttttttatcaaaatggactgacgtcgcaacaggttcacggaataaaacatgtttgatttcaaaacttcggggtgatatccctttctcagctaaaaatcgtgttattaaatccagatacgttacgccgggtatcgtacgcacttgatgaaggacatggtctgaaacaatataatcgtcatgtttgactaatacgctgaacctcatgcaactcgacaacctttcttcttttacaaagtaaagaaacagagcaggtgctactctgtttcatcaataatttcaagaagccgttttttattctgtttgatttgttttttccgatttgaatccggccagtactcttttctgacaaactcggcaggcggcagcggagttctgacggaatgatatgaatcatccaggccgcttaccaaaaggtgggcgtttgttccgccaaaaccgaaagcgctgatgcccgccctccgttttccatccttccagcttctcagctctgtattcggataaaaaggcgacttttcaaattcaaagcggggatttggcgtttcacaattcaatgtaggcggaatttccttatgccatattgataaaatcactttaatgaaacttgccgctccggcagcgcttaataagtgtccgatattggtttttacacttcctactccgcaaaattgcgttttgtttgtgtctcttcggaatacttttgtcagagcctgaagctcaatcggatctccaatcatcgtgcctgtgccgtgagtttcgacgtagctgactgatccgggagtgatatcggctttttcaaatgcatcttgaataacctgctcttgaagcttaggattcggggtcgtaattcccattgtcgcaccgtcgttattaatagctgatgcttcaatgataccgtatatccgatctccgtcagctttcgctttctccagcggttttaacagaacagcgccaaaaccctctccgggtacaaaaccgtttgccctttcatcaaaagtaaaacactgaccgtccggcgaaagagctcctccttctgttaacatcaggtaaggaatttcatccaaaagcagatccgcccctcctgccagcgccatctctgaatcaccgttttttatgctttggcaggctaaatgaatgctgactaatgaagaagaacaagcggtatcagaaaccatgcttggaccgtgaaaattaaagaaatgcgacacatgtgaagcaataaagttttgactaagcccgacgatgtggctgctgctttctttcggcagtttgtgaccgtagccgcccattctggaaccgacaaatacgccgactttttttcccgataattccgtttcttcataaccggcatcccgtacagtctgtacactcgtttctaagaaatgtcttatcagcgggtccgtttggatggctttctcctcttccatgcggaaatactccggatcgaagctgccgattccattgataaatcctccccatttgctgatgctttttcccttttgctgcaccggagagtaattttcttctatattccaccgggaatcaggtacttctttaatatgattcttcccttttctcagattgtcccaaaattcctctttatcagccgctccagggaacttacatccgattccgataacagctatctttgcagaggaagccgtctgcggttctgtatttcggctcgtcacagactgcatatcttgctgattgctgctttgagaatcagtctgttcgatttgtttcttcaacggcggcgccgtcttaccgatatattccgcaagaccatgaatcgtgttgtgttcaagaagcacagtagggtcaatttttttctgaatcattgcttctattcgatgtataatgctgacaagaagtatagaatccacaccgtattcctgaaaatccgtatttgggttaagcttttcaaggggaatgctcaattcctcggcaaatacggcagaaagttcactgacaagcccttctgaatgattaaaagtgtcgggagtctcctgtcttcggactggaaccgaagctccgccggttttattgatgttcaggagactgtctgcatgaaacactgttccttttttcacgataggaatgatattggctgattttttctccagtgcatgatacaaaatcgccagtccttcccgtgtggatagagagtccagtcccaattcatcatataaaggactcgtcacagtacccattccgacttctttccagctcggccaattgatggacgtgaaatacgttctccccttttgaaaatgataagccgcgaaatagtccatatatgcgtttgcagacgcgtaatcagtcattcctttcgacagtttgggtgactgtgctgcaattgatgaaaatagaataaagaaatccagcggcctattattaaaaatccgctccaaattttgaagtccagtgactttcggcccgtacaccgtcttaaattcactcattcttttatgaataaatgccggatttccgccgctgtgcagtccggcacagtgtatgacaccgcttatatctttaaattcaaggcttacttggtgaaagaatgaacgcagcttctcttcatttgtgagagaaccgctgtaatacatatagttgacacctttctcttcaaaactttgaaacagttttatattgctgactgtcttttcgtcctgtctgccctctttcagcaaatgatcccattcacttcgcaaaggtaatggacgcgtacccgtcagcacgagttttttcactccccgtttcaccaaatcttcagctattgctctgccaatgccccctgtcccgccggtaatcacgatggctttatccgcaggaaatgaaacaggcccgccggtatggattctttcttcttcaaaatacggaacatatctgacgccgctgcggtagcatacttcattttctccggtacattgcctttcattctcaaagatttgtttcagctcatgcgtttctttcatgctgtctatatctattgttttcacatgaacaaagccgtattccgcagaaagggctttcagaaaagccgctgattctgcccccgtcagctttggtttttccgctttaaatacctgcaagccattggtgatttgtaaaatggataatggtgtttcctttttactccgcttaattatttcttgtataaataagaatttaccatatgggatgccgttctgattatcactctggtttccgatatctgagaaatcaattatattttggacctgccgctcaccgcccgagaagatctcacggataacgtcgtatgcgtggttttcatctaataaagaacactcaaacatttgatcagagtgttttataaatgaagagtgatatttgatgacaatcagattctcctgatctatatccgaacaaatagagcgggcaattgattctgtgtcttgatttacaaatgctactgtcagtccgtactcttttgtttcggatggatttacaaacggattctccctccattttttttgcaagtgatgttgaaaagaatgctgagggatctctgtcttcttagtcctggacggaacccaataacgttcttttgcaaacggataagtcggaattgagatccgtttacccggctgctgtaaatgttgatgaacggatttccagtcgacatccgccccccaaacccataattgagccagcttttccgcatcaccgttctcaataatagtctttacaaacaattcacctgctgtgccttccgttaacaccttcattttttcagcaaatgcatctgctgattgctgatgaacatatacgcctggaacttgcttgtcaccgcggcaaaactcaaataatttatctttcatttctttaagagacgtaccggtaatcgccgctctggcctccatcgcttctctgcccgattgtgtagtgtatgccagatcccgtaaaacgacgctttccgattggctgccttccatcacttcattcgggaacaggtttcttatcgctccggcatattccttcaataagtattcagtaaccgcttgaatggaggggcaatcagttaattcatacatcgtgagttcaatatgaaacatttcgttaataaaatccgccatccggcttaattccaaaggccctacgccaaattcactcaggtgatcagcaatattaatttcttccggatggatatgaagcaattccgaaacaaacggtttgagtacttcatacaccttttctctcatatcaggctgcttatcctttacttcaggacttagtgaacgttggataaaatctctcatgttttcggcatactcaagaagacgttcattgtctttggcagataacaggacaatatgcggttcgttctcaacatgttctgttgagacgtttgtttcttcatattcttctataatgatatgaacgttcgttcctcccgctccgaatgagctgatccccgctcttctcggaacagttactgtttttccgttttcctgcagttttggtttcttccaatcttgcaatgaccgctgtacataaaagggagatgctttaaaatcgatatttggattcaacgtctccgcatggatggaaggaaacagttttttcagtttcatttgcaaaagaacctttgtcaaaccggcaattcccgctgcggcctcaagatggccgatatttgatttgacagaaccgatggaacaatattgagtgtgctccgtaaattcccgaaacgcttttgttaacccggtgatctcaatcgggtctccaagagaagttcccgttccgtgagcttcaatataactaattgtacgagggtcaatacaagctttctgaagcgcttcctgtatcagttcagactgaccatttggattaggaaccgtaaaaccgtttgttctccctccgtgattgaccgctgtcgctttaatcagcgcataaatatgatctccatcccttaccgcttccgccgccggctttaaaagtacggatcccactccttctcccggtacataaccgtcaccgccttcgccgaatgtacggcatcggccatcacttgcaaagaagcggctttgatttaataatgtatatttattgggatgaagcgtaagattgaccccgcccgcaacagcaagtgtgctttctcctcttcgtatactttcacaggctaagtgaatggcgttaagagaggatgaacacattgtatcaaccgccatactcggccccttaaagttaaagaaatatgatattctgtttgctattgcagaaaatggagacccgacggccagttcatttcctttaagtgattcttcaacgccgaaaaattgatagcttccatatgtgacgcctgcaaatactccgacctttttgcgggtcagatctgaaggtttataacccgcatcctctatggtattgtacactgtctctaaaaagagacgttcctgaggatcaagaaaagccgcttctttcggtgatatccggaaaaataaaggatcaaaccggtctggatttttcagaaaacctccccacttatagcagcttccctccagcatttccttccggtcatcaggaatttcgcttacgcaatcccgtccattcatcagcacattctggaactccctgatgttttccgcgcccggatacctgccgctgacaccgataatggctatatcagcagaaaggggatcggccgccatgtgctcttttgaatcttctccttcagagcgtaccggcgcttttgtttccactggttttctttttggctttttttgatatgagacaagttcagatgtgccggccggtttcagcagtttcatcattcgttcgctgtgatgactcaggaaatattcggctaactgagatattgaatgatattcaaaaaataatgttttcgacaatctgccgatactttgctccagctttttggtcagacgcatgatcattactgaatcaatgccgtatttctccaggtattgtttttcatctatgagtgagaccggtaatttcaattcctctgacattatatttttcagataactgatgatattttgtcttaattcatcgttttgcaaatcggcatcttcctgctggtctgaatgtaagctgattgtgccggcacgcttcagcacatcctcaatcttttctttacggcctttcagggcaatcagctgttcagatgattgacacaagctgttctccagagcctgtattccgtcaccgtcatctaacgggtcaagaccgagttcctgtttcatgtaggatattccttcatcgtcaatattcatcccgccggaagtccatagcggccaattgactgacactatcctttcggcagactcttttgcggtcataactgctgcatactgatccaaacaggcattggcgaaagcatagtcacattggccggctgagccgaagactgcggatgtggatgaaaacaagacaagtaattcaactttcatttttttgatttcttccgccagccacagcgtgccataaactttcgaacctgtgacttgatcaatttcttcttttgtctttcttaagataaaagagtcacggagtacgccggcactgtgaaatactccatgtaaggtgccgaactgctcttttgcaaaagcaaacatccgttcagcatcactttgttttgaaacatcagatcggatatattcaactgttgaacctgaacttcttaaatattcgatctttttctcctgctcttcagttaaatcagagcgccccgtcaatatgagattcgctttccatttttccgacagatgttttgccagaatataaccgagaccgcccaggcctcctgtaatcagataattcccatgatgtttcagcggctgggttaaatcgaatgagccggctttattatagcttttcgtaaaacgtctgccgttttcatagcgcacttcaaaatggatatcccgtttttcgtcacactctctctgatatatatccgctattgctggaagagcggctcccgcaccctctgattgcgtgatattgataatctgatagtgaaaattggggtgttcctggtgaacggttttcaccaatccgccgagagcatgatgcagcggcagttgttctttattctctgtttgaaaaatatgcgtcagctttattatctttttccattttagttcaatcagcgcctgtgtaatatacagaagagaaaacaatccgttttccaattgtttctgtataccttccttcctcatgtcagcctgagaatcagaccacaagtgaagaatcttttcgggcagctgataatgatcatgaatgtatcggaacagctttagataatcgtcttttttcacgtggttcatacaaatcgtatcatcatgtaaaacagcaaattcttttccgcggataacaaacaagagagtacagtccttaaacaaaccgctcaattcttgtatttgccgttcattttctgcaaaaatcaggagcaatcccgtcaagggtacgctcttcttactcggaatgaacgattcagtccattccggcttgtaataaaaaagcggatggttcgatgcccgtgatttttgattctgaatggatgtcacacgggcatagccttcgtcagccgatatctgtcctgattgaatcagatcaagaatatcgctgatttgttcacgttttccgttcatcattcttcccccattaattgtttcaatacagccttctgatcaatatcattggtttccaattgacgcaggagacgaatgagttcgtcgtccgtctgaacagtgtctttttcatgaccatatctgaatctcacatctctgcactctgccagaatgcttccgttttcatctgtaaatgtcatatgacacgttacatcacggctgttctgccggttctctttttgagtatagacataaaaattttgagcgagagggtgatagacatccgccgctcccattccgatcaaatccgggaaggtttcgccgctgacaaaaaacgcactggcttgaatcgcggactcaagcgcttcaggagagatcgtaaaattctctctttttgcataaagctcatccggcaatgaatgaagcgacagcattccgtcactgtttttcgctgattcaatgacaaaaggcgcttcagccggatgttcagtcatttttgattttacttcagcaatatcaagcgcttcaggaagcataccgctttcaggcttaacaatatgcgcatttcccctggcaagacgtactttattctcattttttgtgtttgcatatatgtcaaaccgcgcaaagtcgcgctcaggcgtcagcgtaatcatcagttcccttatatcagtcattccgttcatgctttcggtccacaataaatcagtcaatgtttgaactggttgtccaaatgccgccgctgcattgacgatagccatttcagccaaagatgcataagggaaaaaggacacgtttccttcagacagacttagtgcgaacggatgattacgggtgatttttttcgtgaaactgaactgattaaaatcggacgtgttactccccaagaaagggtgacccggcttactcatatccgctgaaacaagcgtttcccctttttccgctatccaataccgctgtttgatcagcggttgtcccggaatagaaatcctgcgagcattccgattcacctcaaaagtctcccaatctatctttcttccatttacccatttggatgctgcttcggcgtaatctgaacaaacgtgaggcatttcattgtgaacttctgattcgaatgtattaccggtatagcttaagctgcttttttcacccctggtataagctgaaagctcttcagcaatgacccgcccggaatctgccactatcgccagccgttcttccatatgatcgcgtcccgtctgaagtgtataggcaatatcctgaagacgcagtttatgattgttatccttcgattcattttctgatagaaaatcagccataaccttcgcatattttatcagccgttgcttgtcttgagccgataaaacaaagatcactcggccgctttgatgatcaaaagcttttggcggctcatacgcttccaatataagatgcgcgtttgttcctcctgccccaaaagcgcttaccccggctctcaaaggatgaacagcattgctgttttgcggaatattccattcagccgctttccgctgcacttgaaaaggaacctgatcaaaatctataaacggattaacaatatcggaatgcagagaaggaacaagctgcttattcttcatttggagaagcactttcgttaccgcagcgattcctgccgcagattctaaatgtccgatatttgatttcaccgaaccgatggcgcaaggatggttcaattgataggaatctttcagtccttgaatttcaatcggatcgcctaatgacgtacccgttccatgcgcttcaatataattgacggtattcggatcaatgtcagctttacgaagcgcttctgaaatgacctccgcctgcgcatccggattcggtatggaatacccgctcgtctttcctccatggttaacggcgcttcccttaatcacaccgtatatttgatcttgatcgtctattgcttttttcaatggttttaacaatacggccccgactccctctccgggaacataaccgcttccatcttttccaaaactccggcatctgccgtcacttgatagaaactgtcccatgctgaggaacttatatttattcggatgtattgacaaattcactccgccggctaatgccatatcgctctctccgcaatgtatgctttggcatgcgtaatgaatagaggtcagtgatgaagagcacattgtatccagagccaaactcggaccttttaaatgaaaataataagacacccgattggcaattgaagaatagacggacgccggcgagaaagccactccattttcttctccttcaaatagttgatattggccccacattgcaccgacaaatacaccgactttcatcttttccagcatgtttctcgggtaccctgagtcttcaaaacaatgtttggccgtttctaaaaagagcctttcctggggatccataagttctgcttcccttggggaaatatgaaagaaaagcggatcaaattgatcggctccgctgataaaacctccccacttgctgtaagacttccctttcatatctctgtcttcgctgaagaaatcatccatattccagcggtcaggcgggatttctgtaatacaatcttttccgctctttaaattttcccaaaattcaggtaagtcttcagccatcggatacttcccgcttaatccgataatggcaatgtcctcatgccttgtatcagctgtttcatttatttggatctcacggctttcatcctctatgaaggtatcttgaagtgcagattccaatttttctttgtcaccttcaaacacgatcagctgtgatgcgttcagagagagtgaatcttgaaaagctttgatcccattggttttactaagaggaaccataccgattttttgtttcatccatttttcagtttgtttatccactttcatgccgccgtcttcccatagcggccagccgatggctactgagacgccggagcgttcttttttccgcctcattccttcacgccactcagcgaaaagatcgatgaagcggttggccaatgcgtaatccgtctgtccgatattcccgtacatcgaggtgcttgatgaaaacatcacaaagaagtccaaaggttcggtttgcagcaagctgtccaataagaccgtcccatttattttcggagcgattacttcctgaatttcatcttttgatttttgaatcaataaagcgtcgtgcgtcacaccggcactgtgtatcacaccgttgatttccccaaatttccttttaatggtttttatgattcgctctgcatcgcggctatctgaaaaatcacctcttatatattgaaacgaagaaccgcctgctttcattcggctgattttgttctttttgtcttccgtaagttcagaacggcccgctaaaataatattggctttcgtttgggctgcgatatgttctgcaaatataaggcctaagccgccggcccctcctgtaatcatgtatactccgttttctttaaaggagaaatctgagtttggagccggttctgcttcccgtaaggcacggacccagcgcacatttccttcataataaagatcggtttctcccggatgcgcttccgtagattcgactctgatgatttcagctgtaagttccggcaacgatgacttgtctgaaactgatatcccgattgtcttaagggccagtttcgggttctcaagcacaatagactgccctgcgccatggactgaagcgtaaagcggctgatcatttttatgatccgccggataaaggaaaagcgatacaacctttttttccgtcttgctgcgcatcaatgcccggctgaaaaagaatagcgggtaagcccccttagaaagctgttcacttattttttccgggccggcaaatgacccttccggccacccgtaaaccacggtgtcgggcatttgccccctttttttcagatcagctgcaagcctgtcaaagtgagcttcctccctgtgatctatctcataaacaccgtctccgtgataggagaaacgattccctgataaaacgagaatgatctgtgtattttcgaatccattttcagcattttcccgcataaaatgaaaaagctctctgtcatattgaaacagcaggcatgttcttttctttttatttccgcaattcgggtcccaagccgcagccttttgtctccaatgcggcgttaaataggtcaaagccgtatgattctctccatgatgaagagggaggtctttttcaacggaagttttttcgccgctctctgcaaaatagtttgcaagtttttgaatcgtcggatactcaaacaataaagtagggtacagttccctgcctgttttctcttccaatgcctttacggcttgcataagtgttacggaatcgaggccttgttcataaaaaccttttacaacagagagtgtttcaggggcagtccctttgatatctgcaatcagctgctgaatgtctccttctgttataagagcggaaagattttcgttcttactttctttcatgtcaggcttttcagccggttgatttcgcgttaagaaataactggacattctttgattttctttaatatacgcggcgagttcccggatcgttttctgctcaaacaggagtgtaggatacagctgttcccctgttttgttttcaagttctttgacaatggcaagcaaagaagctgaatccaggccctgttcataaaaaccaatgtctgtccttatgtcacgcagatctatatttgaaaccccggatattaattctttaaggtgtgtctcgatgctttcgcttcgatttatgattgaatcttttctgatcaggctgtcttttggctgagaagccgcttcagtttccaaacgagtctgcttcaggttttcaattaaatcttttgagcgaatatgtttcacagacagccgcgtaaaataagcgatcacctccccgtatgcatcgtacaaaccgtaacttacttggatgacatcccctgaatcatgattttggtcttgcttctctatgtacacataacacctgtcttccaggcgcttcgccatacggaaagattcaatatggatgggaatatacgttttcatccggcttgccggagatccttgtgtaaaatattcgggacatgcctgataaaggatcgatatgatggtagacgcatcaagaaaagtgggatgcaattgaaaatagccggtatattgattggcaatttggctgagcgacaactctgcaagtacagaatgatcagacgcataaaccttccccagactcttcataaattcaaaatgctctatatcaaccttttttaaatagtcataacatatctccatatcggcttcacggacggaggcatgtttgatttcatcgatatgaattgacctcatgctttccgggaatttctgcatgagcctgcaggtcatattctcatcccagctttcatccaggatgcggtcatcttttacctttctgctcttcgcctgaatttcccatccctgttccaatccctgaaaacggatgcggatttctctgtcaaaggtatccgatgttgctacaggttccaaatacaaaatattctggcactcgagttcttcaataggcaaacctttgctcagcgccatacggtatatcatatctaaaaatgtgacaccgggtataatccgggtgccatgcacccggtgatccctgacaatatagtccgtatgtttaattgttaatgtgaactgatagttttgattactggccacctgtctcattccttttcttttctttataattctttgaaatcaagtaaaggaatcagcaattctgactcttccttttctggagtttctccattgtcgatccagcattgctccttattgaatataaccggagaaagcgggtgtctttttgtctctccatatcctaatgtgagatggctgtcgctcaatatcatatgtgcgttcgtgcccccgaatccaaaagaactgattccggctctcaaaaccccttttctgggacgccattcttttaaagacgtgttcggaaagaatggcgactgatcaaatttaaaacgcggatttggcgttttacaatgtaatgtcggcgggagcatctgattttttatggataaggcaacctttataatactcgctatccccgctgcgctcattaaatgtccgaaattcgtttttacgctgcctactccgcaaaattgcctttcttccgtaacctcccggaacacttctgtcagcgcttttaattcaatcggatctcctatcatcgtaccggtgccatgcgtctcgacataactgagagtatctgcatcaattccgccttttttcagggctttttttatcactgcgctttgcgctttcggattaggtgttgtcattcccattgtctgtccgtcattattaaccgcggatgagtcaattaccgcgtaaattctgtcaccttcggcaagggcgtcatcaagtcttttcaaaaggactgcgccgcatccctctcccggtacaaatccatctgccttctcatcaaatgtatgacattttccttcaggtgaaagcgcccgagcctcactcagcatgacgtaaggcttttgatccagcaaaatgtcaactccgcccgcaatcgccatatctgactcttttgacatcaggctttgacaagcgagatggacgctgaccaatgaagaagaacaagccgtgtctacaaccagattcggtcctttcagattaaaaaagtgtgagatatgcgcgcctatgaaattttgtcctatacccacgatcgtattttttgaaggggaacctattttggacataaacgtcccggtccgcgaaccgatgaagacgccgacttctttgtttgatacttcttcttttgtatagccgccgtctctcaatgtctggacgctgacctcaaggcattttttgattaacggatcaagctctgatgcctcacttttgttcatattaaaaaacgcgggatcgaaagactcaatatcttgaagaaatccgccccacttactgatactttttcccttttcataggtgtcagagtagtatgaagaaatatcccatcgcgacgccgggacttcgcggacactattttgtcctttcttcaagtttgtccagaacgtttctgtgtccggagcatccggaaactcacagcccattccgataatagcgatttggttcagactggtttgttgtatttgagatctgctgtcccgtacttcggaagcattttgatttatatgttgctcttttttccgaacctcaatgttttctgaatcaatttgaggactgatcccctcacttgcaaataattcgtttaaatagacgcccagttgtgaaaaactcggatactccagaaaagctgatggttcaatttttatttgaaatgcatcttccgcttttttgacaagctgaaccagtaagattgaatcaactccgtaatccgcaaaagacgtatcctgatctaaattctcataaggtattttcagctccgcggaaaaaatctccattaacttcctgatcatagcttcattgtctccctgaccagagatctctttttcttcagcatccgggttatttatagcagcttgaattcttgtctgaagcagctgctgcagcttgaatttctccggatgtgtctttgccggtataaggcatgggtatccgtttatcgtcatcatttcatccagcatggcaatacctgtttctgttgagtgtgaaagtaaaccaagtgcctgatatgatggacttgtcacctcgcccatcccaatgtccttccagctcggccagttaattgattgataatatgttctgccggctgcatgctgatacgccgcaaagtaatccataaaagcgttcgccgcggcatagtcacttgttccggcgcctaataaaggaaaggcgctcgcaacagatgaaaacaaaatgaagaaatcaagtttgtcatcaataaaaatgtcatggagtacctgcatcccctgcacctttggctcaaatacttctcttatttcttgatcagatttatgaataaaagccggattcgaatgattggctgcaccagcgcaatgaatgaccccgccgattttgccgaacttcagtctcacctctgaaaagaagcgatgtaatgtttctttttccgtgagcggcccggaatacacttccacctgaactcccttttgatccaactcatgcagcagttgtaatttcgaataaagaggtgacttttcatcggtgtcttttaacatgccggctattttatcagattccggaaggtcggttactcccatcaatacaagttttttgactcccttgccggcataatgtctggcaagttctgctccgatccctcttgttccccctgtaataaccagggtttgatccgtacggcatactggcagaccggatagtttccggtttatttccgctgcatgtaatttctcgacgtatggaatataacgttcaccgttccggtagcagatttcactatacagcccgtcagcgtaagcttcatctgtgattatctgtctcaattcctccgcagtcccgacatgaccgtctacatctattgtttttgattttatcttttgatactccgcactcagcattttatatagtccggctgtttcggctccggctaacgacggcttgtcattcaaaaatgtctgcagccctctggtcacatgtaaaacgaaaagctgtttacgtgtctttatgatttcctgcagcagtggcagcttcccgattgtgccggtgcgtgccccgttttgatcactccgcaaatctgacaggtcaatcatgccgatgatttccggattttcttctatgaccgctagagccgtttttttggcttccccatccgaatgatcccagttatctgcgcaaatgacagcggattcaatcagaggatctgaatcaaacaattcgaatgcaagccgctcactttcactattagccaggatcatcacctgtcctttcgtaaaagcggagggcgcagccttttgttttttccacgatttttttaatacatcaaatgataagtcaatcggtgcatggggcagactttgcggtacacctgtttttttctgtttctgtgcagcttttgcaacaggcacccaatatctgttccgttcaaaaggataagcaggaagagagataagcttcggtaattccgcagtgtacatctcttcccattgaacgtctcctccgttcacccagtgaatggccatttctcttgcactattaaagtgagtggctgacatggcatccttttgaccagagcctcggcgggcctttctcctatataaaccgtttaccttatgatctgaccgcaaatacatcgtcagcttattgcgaaggtcgtcaatgctgctaacctcaacagcgagccgctcttccatagcgtttctcccggtctgcgaggtgtacgcagcatcagctagtgacgtttttggccccagttcatttatatatgcatcaatcaagagtctgagccgttcttcatttttggcagaaagcagaataatttgcgtattgttgctctttaccgtttccatcttttcttcattcttatactcttcgatgataatgtgggcattagatcctccagcgccgaaagaactgatgcctgaccttctggcttgattttgcggcgtctcccaatcagtcagttcagactgcacgtaaaacggtgtttcctcaaaatcaatattaggatttaagttatcggaatgaagggaaggagcaagctgtttatacttcatttgcatcagcacttttgtaatagaagcaattcccgccgcagcttctaggtgtccgatatttgacttaaccgaaccaattgcacaacgataatcgcttttcgagctgtgcaaagctttggttaatcctgaaatttcaatcgggtctcccaaagatgtcccggtgccgtgcgcttcaatataactaatgctgtctgcatcaatccccgccttatcaagagtttcactgatgacgtttgcctgctcgcccggatttggcacagtgtatccgtttgtttttccgccgtgatttacagatgttcccttaatcacaccgtaaatcctgtccccgtcagccttcgcggcagaaagcgatttcaaaagaacggccccgactccttctcccggcacatatccgtctcctcccgctccaaagcttctgcagcgcccatcgcttgaaacaaaatgattttgtgaaagtaaagtatatttatccgggtgtaaggataaattcactcctccggcaacagcgagggtggattctcccctttttatactttcacatgcaaaatgaacagcagaaagtgaagaagaacacattgtatcaattgcaaggctgggcccgtgcaggtcaaagaaatatgacacccggtttgcgatagacgaataagaagacaagagcgcctgacgttcctcatcatctgaagcaccggctgcaaataactgatagtggctgtaggtgacaccgacaaatacacctgtcttatgccgtttcaactttttctttgtgtaacccgcatcttcaaacgtgtgccatgctgtctctaaaaataaccgttcctgaggatcaattaactcggcatcacgaggcgaaattgagaagaacagcggatcgaatttatcagcgtcttttataaaacctccccatttgctgtcatgacgggcattgtcacctgtgtgataatatttccgaaaatcccagcgctctttcggtatttccgttatacaatcttttccggaagaaatattttcccaaaactgttccacatctttcgccatcgggtagcggccggctataccgataatcgcaatatcttcctcggaaggtgcggatggtgtgcgggaaacggaaagcttctcccgtttcgccggcgccgaatgatcaattcgctgttcggctgccggtaaaaacgccttctgcaactcatgctgatagtgttcaagaaaatactctgacagctcttcaacactgctgtattcaaagaaaagagtcttagacactcttccaaaatatttttccagacgggagttaagacctaaaatcgttagagaatcaattccgtaacggtcaaacgtatcctcgggtaaaatactgtccgccggtcttcccgtttccgctccgacgatctctgttaaaagacggaccgtttgctttttcagatctttttcatgtaattgcggcaggttactgttgttttcaggtacagtctctatttctttatgattagttgagagtaattcacttattctatctttgtctccgctgataacagccagctgagaagcagagcggctcatactgtcctgaaaagcggcaagccctgcttgggcggataaaagttccagccctgcatgtcttaaagcctgcagctctcccggcccgactgtcatattgcccgcatcccataacggccaattaatagaaagtgttttcccgggacgtcccttaatgcttcgatactgggtgaatccgtccatacatccgttagcgaaggcgtagtcgctttgacccgcattaggcagaacggccgaaagggatgaaaacataacgaagaaatctagaggctcttcttcagctgctttatccagccaaacggttccgaatactttaggcgctataacttcttctatgctttctttcgttttttttatgataaatgcatccttaacaagtccggcactgtgcaaaattccgtttaattctccgaatgtctgcttaatgtgcttaatcaaagcgtccgtctctttttcctttgaaatatctgccgggacatataaggcctcagcgccgagattttcaagagcgctcaatttttgcgccgtttcacgggaggccggggaacgcccggttaatatcagcttgacttctgcctgtttcgccagatattcagcaaacagatacccgagaccgccggctcctcctgtaattaaatacacaccgttcttttttacactgaaactatgtttctccccatcttctttttttactctttgaagctgccttttataataatgcctcggctcatagcaggtaaagtggtccgtcttacattgattgttccattcaaaagagatgacatctgcaatatgctgctttgtaaacggctcgtcaaacattgatttcagctctgcagccttacatgtgaaattcggattttcggcctgtacggtcttaagaaaactttcaaccgcgttataaatcggctgaacctcgccctcggcattttcatacagatacaaaatttctgctttcggacaaagtttgttcgccatgaaggcctgaaacatttgaaacaaggaatacagacttttattgagctgctttctcattgcatcttctgtatttttgaagagcccggcagccaaaaaatgaataatatggcggggtcttatattttgagaacgcagaaccccgcataacgcgtcataatcctcaccttttgcaaagttcattgtaaaacgaccgttccggcaatcttcgaaacgctcgccggaagtcacgtaaatgaaaggcgcctcataaccttcaagctgtttcttcattacggtatacatgctgtcgtcttcgcaaaaaaataaaattggctctttcgtatgcgggaattttttactgcctttaaattcatatctatcccataccatttcatatagatgggttttccccaagctcttaattaattccagcccttcttcaggcgtcaggctgcattctttcacctttttcacgatttgctcaatttgcatcgttttttcattcatggaaaagcaactcctctatcagctctgacgtctctttcgtattcatctcacctgtttgtgctttttcaagaagcgacatgatttctccatctgctgtatctttatttgagttgtgaagctcagtgttcgagaaagcctcagctttctgcgcttcatctttatttaaatgaatccaatgtctgttcttgctgaaaggatagagaggaagagacagtttaaccggtttgagttcctcctcatacaagtcttcccagctgatttcacaaccgatcgtccacaactgagccagtttggccggcttgttttgctgaatcagtgattgaacatatgcatgaccttcggggccgtcgaataaaggagcgtacagactatcaaaatccgttacatttccttcataaacaccttgcagcctgctcccctgaatgtaaccgtttaatttttcaagaagatctccggtattcgagcaagtgatcgcaaggcggcattcaaatggttcccttccggtttgcagcgtatatgctatttcttcaagaccgattccggacttttctctaaaattgacgttatgcggtttatcagctgatcgattccggatgctgctgatatagcggcacagctcgctcagtgtctttaattcctgaaatatgtcaagtgatatttctgtgccgtacatttggtttataaaagagattaattcggaataagccaacggatcaaatccgaattccgaaagaggtgtctttgcatctatatctgcggtatctaaacgcaggatacccgctgccgctgcccgaaccgcctcttgcaaatcacgttcctgcacctcttgctgaccgaattgaactgatagttcttcatgtaaaaacgttgttaactctttggctttaaccatcagcctttcctttgttttggccgatagaacaatgatttgttcccgctcgccagttactgctttatcttgtccgtattcaaattcttccacgatgacatgagcatttgccccgccgaatccaaaggaactgactccggcacggcgcggaatttcatttccttttcgatcttttaatctggcccacttcatagttttattgacaatatgaaacggtgttccgcttaattgaatgtaagggttcagttccttgacatgaagtgtggcaggcagtgttttatacttcatggatagtaatactttaatcagccccggcattccagaggcgggctctaaatgaccgatattcgtttttactgaaccgatgccgcaatattggtcatgattctttcctggatgcggctcaaaagatccaaacgcttttttcaagccttcaatctcaatcggatctcccagttctgtcccggttccgtgtgcttcaatgtaagatatcgtatcgacaggaatatcggcatttttgtaaacagacgttaacagttctgcctgagcttccgggttcggagcggtcaatgaagcagatcttcctccatgattttctccggttcctctcaggaccccgtaaatattgtctctgtcattcattgccgcttgcaatggtttcaataacagaacagctgcaccttcaccgcggacataaccgtcggcaagtttatcaaacgtcttacaccggccgtccctagacaaaataccgagtttatcagtatacatatgcgtgactggatctaaaagcagcgaaaccccgcctgctaccgccagctcactttcaccattttgaatcgagcgcacagctctgtggattgctacaagactgcttgagcaggctgtatcaatggactcactcggacctctgaaattaaaatagtgggatacacgattgctgatgagtgcctggctgtttccggttcccgcaaacgcatgcgccccgtccgaatgcctcatcagcagctggcggtaatcattaaattgaatgcccgtaaacaccccgatatttttgccagacagctttgaagctttgtaacccgcatcttctatcgctttccaggtttcctgcaaataaattctgtgctgaggatccatgagttctgcttcccgcggattaatattgaaaaacgcctcatcgaatttatcggcatctgtgataaagccgccccatttcgaatgtacttcgctgtttcctttgccttcggcgtattttttccaatcccagcgatccgggggaatttcctgaatcaaatctttttcattgattaaattgatccaaaactcatctgcattttttgatcccggaaaaacacaactcatcccgataatggcaaccggctgcttctctggatgatggtcagcctgtcttgttgtctttttttcaaacggaaaacttcgcggcggcttcacggttttcccggtggttttcccagcgtgcactactttccttttttcagaaatgtttttttctgcatctgtattcccttttgcaacagtacgcagttcactgtttagaaattctgaaagagacttaatatggctgtaagtaaagaaaacggcaggtgtcagcttaagcttgtattttttattcagtcggacagctaatgttttcaaactgatagaatcaaagccgagattgccgaaattctctgccgtatccagctgttcaatgttaattttcaataattccgacaccatttgcttcagttcttccaggacattgtctgtataagccggtgctgtataagaaatttcctcttgacgaaccggaagcgtatttactttttgatgcggcagatcttttcttgctggtgtcgtttcggcatccccggtaacaaccgaaatttgcgggcagtcacttgccaaaatcgtctcaaaagccgctatcccttcttccgtttccaaataatcaaacccggatgcggaaagatatgcttcttcagcttctttgtttaaatgcattccgcctttacgccacaacggccagttaatcgaaatgctcttgccttgtctctcttgccggcggctctgttcggatctccaatttatatattgatcttgaaaataattgcccaacgcatagttaacctgtccaaaatctccgaagaccgaagaaatagaagaaaatacgataaagaaatcaagcggctcatctttcgttaattcatctaaacataccgtgccttcaattttagcagtcatgccatctgaaaaatcatccagattcatctctgtaaataaccgatcatcggcatgaccagctgaatgaataacgccttgaatggagccccaagtccgtttcgtttcttctatgacccgtcccatcgtcttttgatctgcggcatcagcttgataatataccgcatctcctccaagcgcctgcagccggtcaatgttatggcgtttatcagcagttaacggtgaccttcccgtcaatactaattttgcttgatactgagaagctaaatattttgcgaaaatcaggcccagaccgcccaaaccgcccgttatgaggtaaatcccttcctgtttcagctgatgagagtgctctgtatgattgaatacatagtcctttaatgtcttaacatacctcttgtcattaatatatttaacttcttccgcctgccattccacgcctgaaaccatttcgttaagacaaaattcagccattttttcaattgatatacgttttgaaaaaccgattgacttcacattctctgcggatggcaccaacatattcgccgtttttaaacagcctgcaagagcgcccgtatacggatcattcacgccttctttaaaagagtgaacaagaagcagagaatgaagataaagagaggcgtcactgcgagcgctcagggcttttaataaataaaaaattgattccaggccgctgagaaggcggtcacccgcgtaaaatgtttctcccgtgtgcaagatgacatcaggagaaaacccctttttctctaattcttcgaataaacgaatgtaatctgacgtcacttccgggtttacacagaatgtcagcagattttgatcggtctgccgctgatccggcgtgacgagaatgacacggctgtctgattgatttttcagagctccagccaatgcttcatcttttgcaaagaccagaattgtttttggctccctatctttgatttcaatcagaggttttttttgatcccacttatgctcataaaaacgcacatttttattaggcttttcgccaaaaaccagcccgctcagttccatcaaaatcccgccggcattgtctaatacatacacatcataagccgaatcgctttctccagtttgttctgcatatacataaacgggttcagtctcatgatcaaaaatcgtacattctttaatgttttccgggagctctccggcattttcccccgcaaggtatatgacggcttgatatacgctctcaatcacttccggtttgattatgcaccctttcggcgcggcctttgcttttatttttaaaagcacctgtccgttcctgctgacgcattgctctgccgctttcagactgtcactgcagctgtatccgaattcggcaagccgctgataaaacgcttcgtacggtatgcggtttgcgcgctgagacagaatcggctcaagatgaacatttccgttttcgtacgccccgccttctaattcgagccgccctgaggaataaatggatgagtcgctctgtttttctatagaatacgatgcaccctgattatccggggttaatacaatccggatctgctcattgcttccgctttgtaacatcggttctctaaaggagagctctgttaatttaataatcggattccctgaagccatcgctccggcagctctcgccatttcaatctggctgagaaacggaaacatttccttgtcttgatactttgtttttatatacaaatcggtatcgcttacattgataagaaacttctgggctttaaaatcagatatattgcatgaaatgtaaggatgcagatcgttattaacattcatccggcggctgcccatattttgcacatctattctgcatagctctttggcaaatggatatccgggtgctgatacccgtctcagagtggcatctttataaagtgacggccactctatcccgttaccgccaacccagtattcagcaatcttcacaagatccctgtttgcggctgcttcttcaatttcaactttattcatcctttgagcttctgttgtgtcttcgccgcttgtaaaaatatgatccgtcgcgtttccgagaatatagtctgtcagtcttttaagcaattcatctcttgtggaggcgataacagccaatctgtgcggcatttcttctctgccggtttgtaaagtaaatgctgtatttctaagtgtttctaatggataatctctggctgctatatgttcttttgcgcgttttgcatattctgccagcctgtcggcattttttgcagaaaaaacaaataaaagctgttcaggttcttcagccgcgagaggagagatagcttcatccgcaaattcttctaaaataacatgggcattagctcctcctgccccgaaagaactgattccggcacgcctgggaacggatgactcccatttttcggcactgtccggtacataaaaaggtgttttttgaaacggtatattttcattcaattcagcagaatgagtcagtgacggaacaatcgttttatgtttcatttgaagaataactttcgtaatgcccgctatgcctgcagcagcctcaagatgtccgatatttgatttaatcgatccgatcgcgcatgttttcttatcgcgttcggcatctgaaaatgctctggtcagaccggtgatttcaatcggatctcctaaggcggtgcctgttccgtgagcttctatatagctgatgctttttggatcaataaatcctttttttaaggctctcgtaatgacctcactttgagctttgggattcggcacggtatacccattcgtcttagcaccgtggttgatggctgttgccttaataactgaataaatctgatcaccgtccgcaatagccttttttacaggtttcagcagcacggcacctgtcccttctcccggcacatagccgtctcctccggaaccgaagcttctgcaccggccatcactggataaaaatccgccttgagtcaggagttcatatttatgaggatgaatggataaattgacgcctcctgcaattgcaatttcacattcattcctgattaaactttcacaggcaaaatgaacagccgttaatgatgaggaacacatcgtgtccaaagcaatacttggtccgctgaaattaaagaagtacgatacccggttggcgattgatgcatatgaggaagaaacggccgcttcgtgaccaacgctgtacagctgatagtggccgtacataacccctgcaaaaacaccgacgttttttcgttcaagcgttttctttgcgtaccccgcatcttctatggtgtgccaaaccgtctctaaaaacagtctctcctgcggatcaattaattcagcttcggcaggagaaatattaaagaacaacggatcaaaatgatacacatcgtcaataaatcccccccatttgctttggttttttacttcatcgcccgctgcgggctgatagtgcaaccccgaatcccaccgatcctcaggtatctcagttatacagtctttaccgttcaataagttttcccacagagtatcaagatcatttgccatcgggtaacgtccgctgataccgataatcgcgatatcattgtcatgatacttctcctgctgcaactgatttttcatctggattttctgtttcccgttaacttcggctgtctgttcatgatcttttttcttctgagatggggtgctgctcccgttttctcctaaccggagtttatgaagaagagtatccctgtgctcctcaacgaaatactgtgacaattctgccgcagtctgatattcgaataacagcgtttttgagagcgcgccgaaatgtttttcaagctcattcgtcatattgataatcataacggaatcaagtccgtatttttccaatgcctcttctgcatctattttgtccgcaggcatcctgaattctgcagcaatcacttttatgatgaaatcagatgtttcagctttcagtttctctgaatcaaatgattcgatatttctccctgttccttcatctgcctgaatattgtcttttcgttcatataattgctgaacatgattgtcaatttgctcatctccgtaaaatacagtaaattgcgaaaaaccggaggacaatgcgactgcaaacgcttctttaccttcctctttttctaaaggataaaaacccgcctttttcattgtctctaccgtgcgctcatccacttgcatgccgacttctttccacagcggccagttcagagagagagaaatcgtatcagaatcctgggcagaacgcatattcatgaaatgatccatataactgtttccgaacgcgtaatcagattgcccgacatttcccaacactgcggaagtagaggagaagcaaatgaaaaagtcaggattttctttctcaacagcatcattcagccacatcgtacccaatactttcggtctgattacctgatcgaattcctctcgtgacttgttaagaaggaaagagtcacggatgattcccgcgccctgaatgaccccgtttacttttccataagaagttttggctgttttgactacatattcggcttcttccttattggtaatatcagcctgaacataaacagctgacgaaccggcatcctctaatcgtctcagctgttttcttatatgatctgaaagcggagatctccccgttaaaacaaggcagcattttgtttgaaaagccaaatattccgcaaaggtaaatcctaatccgcccgcgcctcctgcgataatatatactccattttctctcagcggcacatctccgcttcgggaatttttttcgggttcatacgttttgagctgtttgacataacgctgcatgtctttataacgaatctctacatctgaaggctggaaatcactcagctcattgcgtatgatatcagctgcgtgaacagctgatattgactgctccatctcaatgctttttgctgagattaacggattttccagctgcaatgtccgcaaaaatccgcttgccgccgcgtaaagaggctgttctccagaaagatgtgaaaaatatccatataacagtttgatcggtttgcggcagttatttttgaagagcgcctgttgtaataaaaacaaagaatagactccgctgtcgcattgttcacgaatcgctctctctgtcttttcaaacggcatgtctgaccacaaatgcaccgcttcccgtatatctgacttctcttcttctataagccatcctaacaggtttatgtaatctctttcagagcgggggtcgatttcaaatacaccgtccccggtttttcgaaactctttccccggcttaaccaaaataacccttgtatcatgcaatgcagcaagttctttactcacatcttcatttttatcaaataataaaaggctgccctcacgccggccgccttttacatgaatgctgagatctgtccgctgccagaccgtctgataatatatcgcctgtccgttaccccctgcggaatgagaaccaagctgctgtatccgctttactccttcttccaaagaaatgatgccgctttctatgtcagaaagtactttttttctaatatgacgggcttctatcataaaaatcttcatcccctttacaaatggcactgccgcaaatgataaactaatcctgcatacgctccagcgcataatctgcttcctccgcagtcagttcgcccgcttttaattgtctgaggagctcttttactctctcgttctttccattggaatccgctgttgcacgagtctgtgcctccccagaaaacgtttcttttttacgaatggttacatccttcaaacctgcaagtctttctccttgttcattaagcagctgaatatcgtaaataagctcggattgacctttttgtcctgttttacgcgcataagcccagcattctgctgaaacttttttccgtatcgtaatctctcctattgaaaaaggaacataaacagatgcctcttctcttccgtccgtaatgccgaacaaagattgcagagccccatcaattaaagacggatgcaatatataatgttcaagagcatattcgacttcttttggcagcactaagtgtgcaaccgcttctgttttcccgccccataaacattgaatcggctgaaaagcgcgcccatacaggaacccgttctcccgaaaatactcgtaacattcatcttgttcacggacaaaagcacttctgtttatcatctcttgtctgtcgatgttctctatatcatcatcactgtaatgatgatcataatctaattcccccgtcacaaatccagtccttacagcagcatcctcgtcaggtgacatgttaaataatatgctgccgtcttttacggaaatgtgagtgtaaatggttaggctctcttgcaaaagcatggccggtctggcaaatatcacgttttttaaacgagtgacctttttctttcgatatgaccgcgttcccgctgcgcatgccatttcaagaaaagcagctgccgggagaatgctcttgttttttacgatgtggtcttttaaccaaatctcttttcctcttaatgtcgttttaaaaaactgctgttccagagtagattcattcgaatccagaagcgggtgcagtgaagactgccgcggcaatatttccgtaaatgttgcactttggtttcgaggcacccagtaagactcctcagcaaatggatataaaggaagcttgaccttttgcggggtatattcttcatataactctctccattgaatatcagccccgaaagaccataattttgcaagaagattcaagtcctttgtctccatcatcacctcgaggaatttatctttcctcttttgatcatgaaagataaagactttatcaaaatctttcgtaacattccctttgtatacgccctctccaattgttccttcagtacagaaagttctcagcttctccttaagttccggcaaatcgtaagctacaacagcaagtctgtcttccatcggttccctgcatgtctgcaatgtaaaagcgatatcagctgccgagacctttgtctcccgctctgtgaattgcagaaggcgccgggcgtattctttcagtctgtcttcatttttagcagagagaactgcggcaaacggaccgcttattgtttgtgtgtccgcatggttttgatattcttccacaatgacatgggcatttgctccgcccgctccgaacgaactgattgctgctctcctgcgggaggcgcctgattctttccgccactcttcttctttctgctgaacgtaaaaaggcgtcttttcaaatcggatattttggttcagctgttccgagtgaatggatggcgccaatttctgatgcttaaattgtaaaagaacttttgtaagggctgctatacctgcggcagactccaaatgtccgatgttagacttcactgagcctatggcacaaaattgtttatcgtccgtaaatttctcaaacgcttttgtcaatcctgcaatctcaatcggatctccgagcgaggtacccgttccgtgtgcttccaagtagctgacggatcgcggactgatgcccgatttcttaaaattttcagcaatcagctcagcttgtgcattcggattcggaaccgtaaatccattggtttttccgccatgatttacagatgttcctttaatcactccgtatatatggtcctgatcagcaattgctttttccaaaggtttcaaaagaacggcgcccgaaccttctcccgggacatagccgtctccgccctctccgaaacttctgcacaatccttcggtggaaacaaaattaccttgactcagccaaaggtatttgctgggatgtatggacacattaacgccgcccgcaagcgcaatttcactttcccctcttttaatgctctcacatgccaagtgaatggccgtcagcgatgatgaacacatcgtatccagtgcaatgctcggaccggagagattaaaaaagtatgaaaccctgttcgcaatagatgaaaagaaggaactgagcgcaatcggattgccccgcgcagtttcttctgcgccgaataattgatattgtccgtacatggctccgacaaacacaccggctttcataccgtcaagcttctcttttgtatatccagaatcttcaaacgtatgccaggaggtttcgagaaaaattcgctcctgagggtccatcagctcagcttctttatgagaaatgtggaaaaacagcggatcgaattgatcaacaccgctgataaaaccgccccacttactgttgatttttcccttctccattttgtcaggactgtaattcgatctgaaatcccaacgttcctcggggatttcaataatacagtttttccctccggcaatgttttcccagaactcctcaagagtatccgaattcggatatcttccgctcacaccgataatggcaatatcctcacccggctgaaccttgctcggtgcagatgcaaccctctgctgccggtgctgttttttactcagattttctcttttcttcggcactcttgttaccggagctgcccctgcggccttaagcactttttctttaaaagatgttaggaagaagtttgaaagctcttcaatgttctgatattcaaaaaagattgttttgggaagatccccgaaagtatcttcaagctttgaaataagtgacatgatcataagtgaattgattccgaatttctcaaaagagtctttcgcatttattttatgagcttggattttcaagacaccgctgatgatcttgattaaatagtcatttactttttctttcgcagcatgttcctcttcttcatcgtgttccgccgtgagtgtatcttgatctgctgcagctgtatttctttgaatcgaaagcgcttttatcattttatcccgctttccttctgcaggcattaagctggtaaatgaagaccgcagcattttcagaaacgcttccaaaacagaggaagttcgcatcggagtcattccgtatttttcttttatttggttgattccattgctgtcgagactcatcccgccatctttcaataacggccaattgattgaaagggtttttccgtttcgggagagctgagatcgaagcactgcaaaactgtccataaaatgatttgcgtacgcatagtcactttggccggcatttccgtaagcggaaaaagaagaaaagagaacaaaaaaatcaagatcttcgtcttttgtcagctcatccagccagattgtcccgtaaactttcgatttcagtacgtccgtaaaatcactgagacttttatttacaagaaatgagtcacgaaggatgccggcagcatgaatgatcccgtttatgctgccgtaccgctgtttaacgccgaaaatgaatcgctctgcctctgttcgatctgtgatgtccgtccgctgatattcaacaatagagccgctctcattaagcttactgatccgttctttttgatcagcggttaaaaaagaacggcctgtaagtataatcacggcttggttttctttagcgatgtgttccgcaaacagcagcccgagttttcccgctcctccggtaatgatatatatgccgcctttttgatacgttacagatccgttatcgtgttcaggaatatcaatatgctgcagctctttcacataacgggtatatgagtctattaaaatctcacattcatccgtttgaaagcgctgtatttcactgattgcagcatcccacatctcggaaaccggagaatttttgtcagaatcctcatggcgtatctgtatggttttcgctttaagcttagagctttccatgtttaccgttttcatgaaccctccgacagcttcatgaaacggctggttcagaccccttgtccaataaatatgcaataatgtaacaggttcgtttctccgcattaaagcttttgataataaaaagagcgagttgatccctctgcgaagagtttcattaacagactcttcagtgaattctctgatttctccgttccataaataaagcacgacatcaggtgtaaatccgttttcagccaaatcagacagcagcatttcgacatgattttcatcagaaggattgattgtgcatctattccgttcaattctataatcagaatcgggcgttacgagaatgacacggttatgatctccattcatcatctcggcatgctgaaaaagacggttatcctgatcaaaaatcagcatattccccggtgcctgctgattcggcatatcaatgttgtttgttcttacccaatcgttcttaaagaaaatggttggggacggagcttgtgattccggctccgcctttttttccatttgttcttttctgtaagtgcgaattagctccagtcctgcatcaggagacatttgctgttcttcaattaaggaaagtatttgtttgatctgcactattttccctccagcagctgataaacttggtcagcagaaagttcaccgtttttcaattgttctaataagaagagaatttcctgatcttcatttttacgtcctgcggttaattctcccccggtcacttttctgacagaaaagtctttcatgctcacggctatttcgccgctctcgttaataaaatcaatgttatacgtataaaaaccggtttctctcaccgagacatggcatcgggcagtaagcgccctcttaatgtgaagctctctaagtgaatatggaacaaataagccgtctttctcattatctcttaacaaaaatgccgccgcttgaaaaccgccgtcaattaatgaaggatgaagtgtaaaatgtgaaattccgttcgctaaatgagccggaagctccaattctgccattaactccctatcaccgcgatatacggctttcaacgtttgaaaactgctatgatatgtcaggcccatacgactgaagcggtgataacactcttcccggcttatgacagccttactgctgcgtttgaacttatcaatatcgacatactcagcattgctgtttatgtccccgaatactgtttcactttgtgtgcagatttgctgcacgccatccggaccctctttacatatcgttacgttcaacttatcttgtttcatttccaagtcggtataaatgtgcagcgtttttcctttatataatataggtctgttccacatcacgtcttttattttatatactttactttctccgcttatttccgcacaaacaagagccatttcaagcgaagcggctcccggcagcacatagtctcctgaaacaagatgatcagtgacgaaaaattcagttccggaaataacagttttaaatgcttgtttctttagtgttgagacattctcgctgattaatgggtgaagacttttgctattaacctcgcttttgttctttttcggggtgaaccaataactctcttttgcaaacggataagttggcagcggcactctattcaatttcttattgccgattgtcttccattcaaactcggctccattggcccaccattgtgcgagcagctcctcttttccgctatgaagagcctcctcaatcatatattcagaaacagctgtgggctctacagtgttttcgcttataaatacgcctttttgcaccctgctgtcatcaagaaagctgacgtatttatctctcagctcagtcagactcgctgcacatacggcaattctttcgttcattgcttcccggccgttttgcaatgtaaattccatgtcactggcattaacggtcatctcaccggcaatcacgcgatccaagtactgaaccatatgccggatatactcaagtaattgatctttgtttttcgcagataaaacaaaaatatgtgtgttaccgttgttttccggcacttctttttgaggttccctatattcctctaaaacaatatgcgcgttcacaccgccgaatccgaatgagctgacacccgctctcctcggcagatcgttgttctctttatcttttatcggattccacttttgagcggtttctgtgatataaaatggcgtattttccagtttgatgtatggattgagttctgaaaaatgggcgagtcccggaagtttgcgatatttaaatgccagtaacactttcatcactccggctattccggcagcggtttcgagatggccgatgtttgttttcacagacccgattccgcagcatttctgtttcgcaaaaggaatgtcccattctagatataacgttttaaatgcctttatgatgctgtttacttcaatcggatcgccaagacttgtccctgtgccatgcgcttctatatatcccgcagtggcagggctgacccccgccttccgccaagcttcggttaataagtccgcctgtgcgttcggattcggagcagtcaaagaattggcgcggccgccgtgatttacagctgaccctttaatcaaaccatatatatgatcaccgtctgcctgtgctttgctgagcggcttaagcaatactgcagccgccccttcactccttacatagccgtcagcgcttttatcgaacgttttgcactttccgtctttggaaagcatacctgctttatcaaaagctataaacagagtagggcttgtcataatatgcactccgcctgcaatcgccatttcaaaatcgcctctttgaatcccctcagccgcacgatggagtgcaactaacgaacttgaacaggcagtgtcaatcggttcgctcggacccgtcaggttcagctggtaagaaatacgatttgccaatatacaatgatttaaaccggttgcggtctgcgcctgaacagagacgccattttcattcagacgttcagcataatccgttgtggcgacccctgcaaacaccgcggttttcgtccctgccaaatcagacggcttatagcccgcatcttctattgttttccatacagtctccataaaaattctttgctggggatccattaattctgcttcggcgggagaaatcccgaaaaacaacggatcaaaactgtccgcgcctttgataaatccgcctttttttatttttgttctattgacgtccctgatcggatcgccgtcaaactctttccagtcccaacggtcttcaggaatgtctgtaatcatatcccgccctttttcaattccttcccaaaagtcttccagcgtatctgtttgggggaaacggccgcttattcccactattgcaaccggttcattcatatgtctttcctcttggctggttttgttttcaggctcaagggaatgttcataggtttccggcggaggcgtgctgtacaatgttttttcgtcagctgcagaaaaagattctgtctcagcaaaaagaatttctccgtattgctcgattacataatcagttatttcagccagtgaattgcattcaaagaaaatggacggcaataattccgtaccatattgttgattgatttcatttccgagtctggtaaacgtaatcgaatcaaatccgtactcgccgaatgaagtctcttcttctatttcctttctgtcaatcttcaaaatacttgacatcatctttgcgatgccctcaatcagattttctctccggtctttcgccgcagattcatctgaagaaaaagaaccgcagagatgaagctcctcggaatactcactctttaaaaactcaagaagttcattaaaatcagtaagaccgaaaaaatctgacggcatcattgatattcctaaagtttcgtttaattcgttgcccagcattgtaaacataattgaatcaaatccgtattcacttatcggcagttcaaaatcaaattcccgttcttcaatttttaatacgccggtgatgatgcgcgtcaaagtgctttttaaagattcagttattgacagctctttcggttcgtgattttcgtcggcgattgccggatcactttttccgctgtcaatcgttatcattcgttccagctttaattcattaccgctaaataccattatttgatgttcacaccctgtcattgcttgatcaaatgctgcaaggccttcccgttttcccagaggcagcattccgaaacggtcataaaggaacttctctgaatgaatatcaatttgcataccgccttctttccataaaggccaattaatcgagactgtttttccgggtttattttccgccgctctcatttccgcaaaataatccataaaccggtttgcataagcataatcagtttgtccggcattcccgattattgcgctgatagatgaaaacataacaaaaaagtccagaggttcactgtctgtataccggtcaagccatatcgttccgtaaaccttgctggccaagactgaattgagatcctcttcacgcttattgatgagtaatgaatcttttatcacaccggcgctgtgaataattcctttaacaggacctaatttgtttttgacgagttttatcaggttattgacattttccttatcagaaatatcggttcttacataaaaaacctctgatccgtttttttcgagctcttttacattgcttacggcttcctcagaaagctctgacctgccgataaggacaagttttattctcccttttcgcacaagatgtctggcgaaaatcagtcccagaccgcctgttcctcctgtaatgaggtaaactcccccttcttttacttccatcttttcggggggctcggcactttcaatttctgcagagtgctttacctgcctgattccatctctgtatctgatttctgaagtttcatcgctgatgattgtttctttcacaaggttttttaattcaggcagaccggcgttcagctgtaactgaatttcgtcgctgtgtatttcaatatttttaccggacaacataggatgttctaaatgaagcgacctaaaaaagccgctgattgccatttgataaggtaagatttgattttcccttgtgaaaaatacatgtgatatcaggattttatgtcttgggattgttgctaacagagctttcgttacattgaaaaccggcaaaacagcctcttccagcttttcacgaatgttatgctcaattcccgtttcagggctcatcccgattaaaatgacgcggtcaattgtcacttgtctttctttaagaatcgccagcaatttctgatagccgtcaagtttgacgctgttcaattcaaaggaatcagcttctttttcttgaaaactgccgccatggcggacaaagatcatattcaggccgatatctttatatgcctggcggatcagcggttctgatatatcccgacggagtgaaatcacaaggcagctgtttaaaccgctggcttcaggctgatgaagcagaggggcccgcttccacatatctgtataatacttaactgaatgccgctcatcctgagtctgcggtgcagcccttaatgccttcaacgctaagttttttattttaagacttacagatccgttttcatccataaatagtatatgaaaccttttgacatcatcatgttgtctttcatcggcagctgtaatgtaagcatagccgtttgccgaaggtgcgtgaagaatctccagctcacctaattcaaaaggcaaatatgcggtgtgatcgtcttgctgaccggacgtaaaccctgttgtggattgaaaaatgccatccaataaacacggttccagcagcgtgccggattttttatgaatgctctcaggaagtgatattcgtgcaagaacagcattttcatggataaacagctgttttattacctgaaaactggttccatagtccaaaccgctctgccggaaatccctataacactcagcgccgctgattaatcttttctgtccggttaaccagctgtccaattgaaaacgctctgtttgagaggcatcttgatctccgcatgtgataatgtttccttggcagtgaactgccgcttcaggttgcatatcggttttcaccacaaatctgccgtctttttgattcggcagcagatctatcattatcgtcttttctttttcaacggttatcggaaccgcccatacaacctgactcagttttatgactgattttccgtacagcctctctcccgcttctctggccgcttcgatgattgccgctccgggcagaaccgctttcccatgcacaacatggtcttttacataatattcagaatcagaaagcattttataaaatcggcactcacctgctgaaaaatcaaataaaggagctgtaccggctgctgatgttgtttgcgccttatttgacacccacagtctgttttttaagaaagggtaagtcggcagggcaatttttctcggttttctgccggtgcggaaatcttcccagcttaaattgcctcctgatacccaaaattcagccatttcggttaatgtggtgctgccggatttgagcggaagatccgattgctgctgtccgcgtttatgattcggttttttccctctaaatatttcgtgatcatcaattccattataaaagtgatttaatttcaacattagatcatcgatattatttgaaatgacagcaagcctttccggcatggcttcacgcccttcgagaagggtatacgcaatatcagaaaggtgaagcggcttgtttgttcccgcttgctgtaaaaactcgccctgcttatgacgggccttttgaagatattcctccagctgttttgctgattcccgtaaactcagtgaatgcttggctgagagtacgataagttcctcactttcctcacgcctcgtatgacagtcagcagcagactcatactcttccacaaggatatgagcatttgccccgcccgctccgaaagaacttaatcccgcgcgccgcggatatttgctgtcagaatgtttttcattcgcgggttttatccagtcggcggtttcctgctggaggcaaaaaggtgtctcttccagataaagatccggatgcacccgttcagcatgcagtgttgcggctatttttttatacttcatttgtaagataatctttgtcaggccggcaatacccgcggccgcttccaggtggccgatgttagatttaatcgatccgagagagcaatatgaaacatcttcggtataagctctaaacgccttggtcaggcctcggacttcaatcgggtcacccagcggcgttcccgtgccgtgggcttcaataaagctgacacttctggcgctccaaccggccgctttaagagctccttgaattaaatccgcctgtgcggcaggattaggcaccgtatagccatttgtctttccgccatgattaattgccgttcctttaatgactgcgtacacagtatctttatcacgtatggcatctttaagcggtttaagaataacggcccctacaccttccccgggcacgaaaccgtcgccgccttctccaaaacttctgcattttcccgattttgaaagcattcccatctgacatcggtataaatagtcagaaggatgaagatacaaatttactcctcccgcaaccgcaaccgagcactcaccctttgttaaactttggcaagccatgtgaattgccgttaaggatgaagaacaagccgtatctacagggacactgggacctgtaaagtcaaatgtgtaagacactctgttcgcgagagaccatgggaacgaatttggaagtacatcgtttttgtccgtaggtattctttcgccgagcagcttgtaagaattggtcgtcactcccgcaaatacaccgacatgtttttcggtctgctttctcaacccttcaatggtatatcccgaatcttcaaatgctttccacacggtttcgagaaatattcgttcctgaggatccatcgcttctgcttctctcggcgatatttggaaaaacaaagaatcaaatgattcagcattctttaaaaatccgccccatttgcaataaattttcccctcatgcgctttagcggggtctggatcatagtaggtctcataattccatcgttctttcggaatttctgtgattgcggttctctcttttgatagaagctcccacaattcttcgatattttcagccccgggataacggccgctgataccgattaccgctatcccgtcaagatgttctttttcctccgccgcaggtgcagtgatgttttgttccggcctggcgggggtaatgctctgaatctgttttcctttttcctcccgtgaaaataaacgccccagccgatccggatattcctttacaagatgatctgctaaatctctgattgtatgaaattcaaataaaagcgttttcgaaattgctcccagtgactgctccagctttgtgttgcattgatgaatcataaccgaatccattccatattcagccagatgcacatcttgatcgatctcttcccgttctgcaccgacctcagaggagatgatattggttaaaaacaaaactgtttgatccaaaatatcgccttgagccaaaggaatggcactgcctgtctctgtttcatccgtcaaaaatctctgccgcataaattgttcaaagcgctcatgatcaccgcagactgcaatattatgcagctgacccgaagttacaatccgcgaaaaccattgcgttccgtcttcagcaggaagttcttcgagcccggaaccatgaaaaagagacgtccgcccttgacctgacaggttcgcccccattccgatgtcttgccataaaggccaattgattgtcagcgtgcggccgctgcgcagagaattttgccgtttctgttcccgatattcggcaaaatgatctaaaaagccgtttgcatatgcataatcacactggccttcgttccctgcaatagagacgactgaagaaaaaacggcgaaaaaatctaattccagcgacttcgttgcatgatcaagattcaatgcaccatgaactttcggagcaatcacctctgaaagttcctgctttgtttttcgaaaaagcagcgagtctctgataactcctgcacaatgaatgatgccatgaagacctgcatgctgatcggtaataccgtcaatcattttttttaccgcttctttatcggatatattcgcctgtatataataaacctttgctttaaagctgttcaggtattctaaatgtttctgcttatcttcgtttaaaacagatcgccccgataggataatggtggatctttcagttttcgcgcaatattcagcgactttactgccaatccccccgaatccccctgtaattaaatacactttatctttttcagggtattgaatggtctttctgtttgtttctctctgcttcactaacatccgtgcatatcttacgcagcctctgtaagtgatatgaatatgccgatcaggcgctgtgtttatttctttataaagaatgtcagccttctctgaaaatgaaacggatgcagaatcatgttcaaagcaaaccgtcttacaatgcagctgcgggtattcttgttttaccgatttcaaaaaaccgttcacaccttcaaaatacggcaatttttctttttgatctgcgctgaatgtataaatgaacgttactttgtttataaggttctcgctgattaaagccttagtcagataaaacacggaataaattcctgattcgagtgtgtcttccagttcaggctgtttttcagaccacgtatgcaaaattgcatcgggcgctgcgcctttttcctttaacagacgaatgacaccttgataatcttcgggacgctgcctgttgatcgtgaaaacactgtcgcttatctgctctaaacggtcactgggcataataagatatgcggacgtattctctctttttttcagctcttcaaaatagtctttattcccggagaacaacaaaatagtacaagcttgtccgctgcccgcttcattctcaagtgcggtttctttccataccggcgtataaagtgcctgattcttcttttctgaaaaagccgtgtctgattttaccggctgagggtttaaagaaaattgagagcgctcaaacggataaggcggaagcggtgcttttcttttatgatcatcacctagtttcgcccattcaatctcttctcctgaaagccacatttgcataaatgaatgatatagagcctcatcggctggtttgtccgcttcaaaagcagccgctttgtttagttttgctgatggaggtagcgatccgaattgaaaaactgaaaaatcagaaatattcacatccggctccgttcccttttcttccgtgtgaagcggcatatggtcagctatctcctgagacacggcatccatttgattgtattctgtcatcaacggaaaacgagttttatcataaaaacctgccggctgctcattaatacaagcaacagcctgtttaattccgtcttgctttttcaataacatgctcagaaaaagttctttagacaagattccttcatccagtaaatttaatatttccagaacataatcatcattaaagaatccatcataatctgttaaatcccatctcttatacagtcttctcatagaggcaaggatagccatgatcgccgcttcctcatcagccggcaatgcatttcttttatccgccgtgcgattcacaatataagataaaatctcgatttcctgagtctttcccgctttatcccactcttctaaaaaccctttaaacgtatattgatgctcaagaagcagccgtgttttcccgtacaggcggtctgcaaaatcagccgggaagctcagaccgttcagcagcatccttacataatcttcatttaatcgaaccggcgggtacgtttttgaagtgtacggattgacaaatggaatggacggcggcttacaggatatgtgcgaaggtttttcagcgcctgtgatgacagaaatggccttttcaattttgatgatatccgctgctgcaagagcgacgtaatatccgtctccggcgcctgtaataaggcttggcttaaaaccggatgccaggatactttttatgatttccgtattgataactaaagaatacaagcggattttctcaggtgtccattttcttttaaatgaactgtgcaatgttggtatacccttcagcaccggccttacgttcttttctaaatcagggaacacccgtttcaaagcggcaaattgtttataactttcccatttgaagtcaccgatggcaagcgcccattcagaatcttgtttcctccgaaaacttaatccctctttaagctgatttttaaattcctccttgctgcctgccaataaaccagccctgtaatcaaacgatgtccttgttaaaagggtgctgctgatcacttcatttgatattttgcaaaattcctcagaatcgtcagcaaaggttctccaatgatgtatcatttgtttcatgctttcttcacttttagcggaaaaaaggaagggtacccttccttttctgtcagattcgtcttttgtatgtataaattcttcgatgatgacgtgagagttgacacccccaaaaccgaaggagctgattcccgccctgagcggagccccgtctgccgccttccaatcacttgaatcaagcgccggcctaaacggtgttttttcaaactgtataattgggtttaccgtatgtacattcaggcttttcggcaccctccggtgtttcatcatcattagaacttttatcaatccggccattcccgccgctgcttctgtatgaccgatatttgttttcacacttccgatcctgcaatattgagtattctcagtatattgccgatacgcttttgtcaatgcttctatttctatcggatcgcccagagatgtacctgtgccatgtgcttctacataagaaaccgtcgcagcatcgacagcagcgttgtgtaaagcttctgagatgacccggcactgcgcttctgctctgggagcggttatggaacgggttttaccgccatgattaacagctgtcccttttatgatcccgtatatatggtgaccggcttttactgcatcaccaaggcgctgcagcaatacaacgcctgccccttctccgggaacgtacccgttcgccgctgcgtcaaaggttttacatttgccgtcaggactcagcattctggctttagaaaaagaaatatattttccgggttggaaattcaagtttactcccgatgcgattgcataatcgctttcttttgtccgcaatgacttaaccgcttcatgtaaagcaacaagcgatgatgcacaagcggcatttacagacatgctttttccggtcaaaccgaatgtgtatgaaagccggttggaaagcatagcttcgaaacttcctaaacaggcataactgtcgatttccgattcagcatgacctgtctgccggtagtcagaattcataatacccgcaaaaacagaagtggttttacactggagatcctgcaaagaaacccctgaatcttcgatgcaccgccaagtttcttctaaaaggattctttgctcaggatccatgtttttcgcttcccggggagagatattaaaaaacttatgatcgaaatggtcagctttatgaataaaacctccccacttgctgattgttttgttcggtatactgatatcagctgaataataaagatcgggatcccaccgttcaatcggcacttcccggatggaatctttgccgctatttatgttttcccagaattcatgataatgatctgcatcggggaatctgcaagcaaccccgattatcgcgatatccgcattctgtttattcaaatgaaccattggcctccacccgctccttctttagtgtagaaataacgtatccaatctgcgccttagcagactttcggtctcattcatcaatttttcaccaatgtcatcgacatgtctgtttctccatgattccaaatccgtgccctttacccaatgattaaaagcgcctaaagacgggccgcaatgaacttggaaattcaccttttgttcttcctgcccttccaaagcaagcagacatcctctctgcaaataccacttaaatagtaacagcatcttatatttttgattgcgctcagctttttgggccaggttcggctgtttttctaatatgctttcgtagatttcatcaaaagtcttgttaaaataatcattttcgagctgaatctttgtcttttcatctatctcactcaacgactcatattgttggtagatttgaaataatttatttgccctgaccgaaaacagcgtgccctttttcagcacctgaacctttgttccgaactcaaacagagtctccgaaggcgcataagcagtatcgcatattcctgtctcactcagcatttctttaacaaaaccgcttgtttcggcttcaactgtacattgattaatggatcccgtcataataaaatcagcgcccattaaaaaagcagacgcggcagactcgggagtcccgattcctcccgcagccccgatccttatcttccttgcgtatttgtgtgtttccatcatttcatcccgcaggttaacaaaaaacggcagcatcgccgtcaatgagccctgttcagtattacttccgcaatctgcttcaataatgatatcgtctgctgccggaatacggctgagccactccgcctgctcttccgtcagcataccgtgctgacacattctctttacgatacttggaggaggcggactcagaaatgcggccgcaacttccggccgtgaaactttggcaatgatccgattatgaggtatgaccctgccgcttttgtctatcttcaactgatgcgctttgtaataaattaatggtgcgctgacagaaagatacgaagacgcttctattactcgtacgtcatgcttgatatataaatctatcaattccttttctctatcttgatgatccggctcaaatcgcagattcattccgtagggctggccatttttgagtgtcttcttaatagaaataagggcctgttcaatttcccttataggtaaacccgctgtgccaaagaaccccagcattcctttcttcccgaggcggatcagcatttcagcggaagaaatccccctattcatcgcacctgccaaatacgcgtatgtcaaaccgtaatcttctttgaaagattgatcacccaatcgggacaccggtgaagctgcaccgctctctatattttcggccaagaggctatgctctttcccgctttccgaattgtccttgttcccttcagaaaaaaagagactgtcttccggcgcactgatagtaagcggttcctcatctctttgtatggtttgaattaatttagtcagaatgtttccaggaccgatctcttcaaacagagtgacgccttgtcccattagatacctaatgctttcagtccattttaccgagtttgttatttgttcaattaaattccgtttgatatcttcttgtttataaggtcttgccgtatagttagaaatgaccgggaaattcaattcagaaaaatgaaactcctcgataaattccgcaaattcacgctgtgcactttccatgaaacgagaatgaaaagctccgccgacttgcaatacgatataagctttcgccccttctttttcaaaaaaagaggctgcccgctttatctcttctgcagcccctgctatcacaatttgtgaagatgtattgtaattggcgatatctatctggccgagttcatacttttgaagtattttttttatgtgatgctcatccagtccgatcacggcagccattccgccctcggaagcctcactcattaactcgcctcttttagcaaccagccggagacctgtttcaaaattaaaaacgccggccgcaaaaagcgcagtatattcacccagactatgtcctgcaacagcatcagggcgtgtatgaccttcttttaaaccctttaaatattgcagtgcgctcactgtataaattgcaggctgtgtatacttcgtatcagtcagcctttctttttcatctgaaaggcataaatcctttatggagtatcctaaaatatgatctgcctttttaatgagctcactgaattcatcgaataagtctctgcccattcctttaaactgcgctccctgtccgggaaagacgtaagcaagcatttgttttcctcctgttccgtatttctgccgtttcttttcgttccgattttgattaacgtttttcacttcaattttaaaattgtcgtttactctcagcacccttacttaataagcattactaagaaaaataaaaaaacctttatgccggataaaggtttaaaagcaaaaagcatgtacaaatatcatatcgccgtaaatataaatagatagaattttctgataattaaaatcgcattttcatcctgttttatatatatatcaatataataaaaacattccaacgtgccgaaacaacgattggttttatgtgaatatttccctaaataaatactataccatgatttacttgttgtcaatgggaaacacacgtatataccaattcttcagccgcctttttacaggcggctgaactcggttgttatcagttcatcagcccatgccgatatgccttcactatactatttgcggaataatagttctttctctttgttgtagtctttagtaaattgattgaactcatctgcttgtttatgcaccttttcgtaaactgagtttactttgctgatttgctcttccagctgcgctaatgtgagctttttatctttaatcagtttataaaggtccttatcaagtgaaatggctttttcgtactttttgtacaaaagatcataagatgcataccttttctccattaaagcgacagcatgcccggctttttcttttactttcttatcctttatttcttgagaagttttttttgcggattcaaacgctttttttgaatcatcaatactgtctttttctgctttcagatgtttttttcgctgatttgcattgctcagagcctgatcagacagtgtgacaattttctggtaatcatccatattcagtttaaccgcgctgtcgtatagcttatgctcttttttctccaatttttctaatgttttctgctctttttgaaacggtttttccgcttgaacggctttttccatcgagtcatgaagcgattcaaccggatcttttcccccgcagccggcaagaagcatacttgcggcgccgagcgctccgattcctgctaatacctttttttgaatcatattcacttaaaatcccccaatcttgacaatttccactatagaagcccgaacgctttttgacaatagctgagctgtaattggcatgaccgtgtaaagacgcttacggtgctttcaaagaatacttgcgtaaaaaattgagaaaacagggcggatgaccatacatctttttggcttttacatagtttatagtagacgccggccctgctgacagagggtcagcgtaattaaaagaggaggtttttttatgtacggatatggatttggcggcggatttggcggcggttgttgcggcggcggatatggttatggcggcggttacggttacggctgcggcggcggatacggccgcacattcgcattaatcgtcgtattgtttatcttattaatcatcgtcggtgccgcttatttaggctgcggctgctgacattatacaccatgacatcggccggcctgctatggccggccaattgtttcattgcgccgcgataaagaaattcgctataatttacatattaagctttaggagtgaagtttcttgattactatggaaaatattgtacgagacggacatcccgtgctcagagagatcgctgaagaggtacagcttcccgcttctgacgaagaaaaacagcatcttgctgatatgattgagtttgtgaaaaacagccaaaatcctgaattagccgagaaatacaagcttcgtccgggcgtcggtcttgccgctccccaaacagacgtaaaaaaacggatgatcgccgtccatgcagaagatgcgaaaggcactttatacagctatgctctttttaaccctaagatcgtcagccactcagtggaaaaaagctacttgacgagcggagaaggctgcctgtcggtagacgaacccattcccggctatgtgccgcgctacgcccgcatccgcgtaaaggcggtgacgcttgaaggagaacagattgacatccgcctcaaaggttttccggccatcgtgtttcagcacgaaatcgatcatctgaacggcgtgatgttttacgaccatattgataaagaaaatccgttcaaagaacctgaaaacgccattgccattgaccgttaaaaataaccggcacttcccaaagtgccggttttctttatttcaaaaggcccagttctttgacggcccagctgattccttcctcatccaccggctttgtgacgaaatcggcggcagcttttaattccggaaccgcatttcccatcgccaccccggtgccgacaaaacggatcatctcaagatcatttagtccgtcgccgaatgcataagtgtcacttacgccgtacggaagccgctcaagcactcttttaatgccttccgcttttgaaccgcctttcggaagcacatccgttgacaattcatgccagcggacgtaatcaaactccggaaaagcggcatatgctttttcttcatgtccgcggcagaataaaagcagctgataaatttcttttcctttataaaaagtttcatcaacttcgggataaggcgctttcagactgccgattccttccgagacgtgcggatgtccggggacggtcgttttcatcgtgtcttccgccataaatacgacggggtgctccccttctgccgcctgctttaataaacgcgcaaccgcatcttcaggaagcggatttttataaatgacctcaccttcaaatacgacatactggccgttgtatgaaataaatgattcaatctcaagctcttccagaatcggttttaccataaacggggaccttccgctggcgataaaaacgtgatggccagcctctttaagcgccttcacggcgtttcttgcgctatagggaatatgtttatcatggtcatagatcgtgccgtcaatatcaaaaaagatcaattttggtttcatgtcaatttctcctttttcccgtttatcagtcgtgtctttttcaatatcatcatacagaaagtttttcttccggaaaaccgccttgatgaaattccagttttacccacgaaaacaaattcattttttccgcatactactgctataaagggctttaaaggaggtatacaatgctgcgccgattacggaagaaactcagaagacagtggggcggaatgctccgaaaaaaagtcatcgcgtagaagggatctttcggtttttgaaagtcccttttttgctcgagactttccttataatccgttttcgaatataatagaataagcgagtctaacatacggcatttaaggagagatttggatgatttataaggtattttatcaagagaaggctgacgaagtacctgttcgggaaaaaacagattcactttacattgagggcgtttcagaacgggacgtcagaacgaaactgaaagatcagaaatacaacattgaatttgttcagcctgtggacggtgcttttttagaatatgagaagcagagcgaaaattttaaagtattggagttatgagcggaatgaaatttgtaaaaaatgaccagactgccgttttcgccctcggcggattgggcgagatcgggaaaaatacgtacggggtgcagtttcaggatgaaattgtactgattgatgcgggaatcaagttcccggaagatgaacttctcggcattgattacgtaatccccgattacacgtatttagtaaaaaatgaagataaaattaaaggtctgtttatcacccacggtcacgaagaccatatcggcggtattccgtacctgctcagacaagtaaatattcccgtttacggcggtaaactcgcgatcggcttacttcggaataaacttgaagagcacgggctgttaagacagaccaaattaaacatcatcggtgaagacgacatcgtgaagttccgcaagacgtctgtatccttcttcagaacgacacacagcattccggattcatacggaatcgtcgtcaaaacaccgccgggcaatatcgtacataccggggactttaagttcgatttcacaccggtaggcgaaccggcaaacttgacaaagatggctgaaatcgggaaagaaggcgttctgtgcctgctttctgacagtacaaacagtgaggttcctgatttcaccatgtcagaacgccgcgtaggcgaaagcattcacgatattttccgaaaagtggacggcagaattatatttgcgacattcgcttcgaatatacaccgtcttcagcaggtgattgaagcagccgttttaaacggcagaaaagttgccgtattcggacgcagtatggaatcggctattgaaatcggacaaaatctcggttacattacctgtcctaaaaatacgtttattgagcataacgaaatcaatcgtttgcctgccaataaggtaacgattttatgtacgggaagccaaggtgaaccgatggcggcgttatcacgcatcgctaacgggacgcaccggcagatttccattaatcccggagatacggtcgtcttttcttcctctccgattcccggaaacacaatcagcgtaagccgcaccatcaaccagctgtaccgtgcgggcgcagaagtcattcacggttcattgaatgacattcatacatccggacacggcggacaggaagagcagaaattaatgctccgcctgatcaaaccgaagttctttatgccgattcacggtgagtacagaatgcagaaaatgcacgtcaaactcgcgactgattgcggcatacccgaagaaaactgctttatcatggataatggcgaagtgctggccctcaaaggcgaagaagccgctgtggcaggcaaaattccgtccggctccgtttacattgacggaagcggaatcggtgatatcggcaatatcgtgctccgcgaccgccgcattctttcagaagaaggccttgttatcgttgttgtcagcatcaatatggacgactttaaggtttcggcggggcctgatttaatctcaagaggttttgtatacatgagagaatccggtgatttgatcaatgacgcgcagcagctgatttcgaaccatctggagaaagtaatggatcggaaaacaacgcagtggtccgaaattaaaaacgaaattaccgatacacttgctccgttcctatacgaaaaaacaaaacgccgcccgatgatccttccgatcattatggaggtctaaaaaaaactgcactcgtaatgagtgcagtttttttattgcagcggaatatgctgaaaggctttgacatcaaacagaccggctgctgtcattttaatatccggaatcaccggaagcgctaaaaacgataatgtgagaaacggattgaaatcaccgttgaatccgagcagaggaagcttttcatgaagcacgcccaagctgtcattgacccattccgccgacttatcagacaaaagcccggcgatcggaagcggaacggagtgaagcaattctccgtttttcacggctgttaatcctcctccggtgtcacggagcctgttgattgcttttgccaaatcggcatcgtttgtaccgacggcgatgatattatgggaatcgtgagaaatggttgtggcgatggcgccttcttttaacccgaacccttgtacaatcccgagtcctatcattttttcgccgctgtgccgctctgcgacggcgatttttaataaatcattttctgtatcaggacgaaacgcgtcagcagacggtgcaggcacttctttttttctcgtctccaaatgattcggtatcatttcgattatattcattttcttaccctcttgaatcggtatatgaaaatccgattcagtcagcggcgctttcagccgcactgtatccaacagcgcctggtccggcgaataggaaccggcagactgttcataaaccgtgcgtccgttctcggcaacggtccggccggcgaccatggtcttcgtgacggcagcctcccgtacatctgaaataaacagcagatctgcgtcaaaacccggcgctaccgccccttttgtttcaagaccgtagcactcagccgcatttaaactggcgagttgatacgcaaggaatggatcaagtcccgcctttatcgccattttgacttggtggttcacacttccttctgaaagcagatcatctacatgcttatcatccgtgcaaaagaaaaagcgtcgcgcgtttttttcattcaccgccggcagcacattgagcgtattttttgccaccgatccttcgcgcagcatgacatacattccccgtctgattctgtccagcgcttcttcttttgtcgtcacttcatgatcatttgacaccattgcggttctgtatatattgatgatatctgaagacagtccggctaaatgcccgtcgatccgttttccgtgacgcttggcatcaagcagtttctgaagcatatcctcttcaccttccgcaacagatacataatccattacttccgcaagcccgagcacctctttctcctgataaaaaggctttaaatcctcggcttttaatacggctcctgagcgttcaaagctagcggcgggaacacaggaaggaagcatgaaacggatgttcagcggcgcctttttcgcctgctctatcataaaagaaatgccttttgctccggaaacgttcgcaatttcgtgaggatcagtaatgacagtagtcactccgtgtgggaggacggctttagcaaattcaatcggagtaaccatagaggactcgatatgaacatgtccgtcaataaaccccggaacgatcatttgaccttctgcatcaatgacttcttccccttcatattcgcccagcccgacgatcactccgcccgtaatggcgatatctgcagaaatccattcctggttaaatacatccatgatgtttccgtttttaatgacggtatcggctttttgtctgccggctgatgcattcagccgttcagccagtgtttctttgttcaaaatgaggcctcctctttttctttatatggtacaatatgctatcggatcgcctgatcatagtcaataaaaattgcagaaaataccgcttacacgataaatgtctttctattctgacataataaaagaccgtccttttacagacggcttttcactttgtgtgaagcactcttttttcaaatcgggaaatgtccgtaagagagccgataacgatgagaatatcttctttttggatcatttcagtcgccagcggagatacgatcacttctttttctctcttgatggccacgatattaatgccgtacttcgcccggatgtccagatcaagcagtgtgttgcctgcaagcctgctgttggccacgatctccacaatgctgtgttcgtcggacagctccaaataatcaagcacattatttgatacgatgttgtgggcgatgcgttttgccatgtcacgttcagggtggacgatgtggtcggccccgattttcgcaagcactttctcatgataatcgttctgcgctttaaccgtgatcgtattcacgccgagttcctttaagatcagcgtcgttaaaatgctcgcctgtatattttcgccgattgccacaatgacgtggtcaaagttgcgcagccctaagtttttcagcactgattcatcggttgaatcgccgatgaccgcgtgtgatgcgattttggcgtattcattaactttatcttcatcaatatccatcgccatgacctcaaggccttcttcacttaatgctttgcaaatacttccgccgaagcgtccgagaccgataacggcaaactcttttctcataacagtactcctttaaacaatatctctaataggaatagtatcacattttcggcaatgagttcatatagcgtttaagcttttctgaaaaggcgggcgataaatacaggtccgctccgcgttcgatttcttcctgatagtgacccggaggcgcaatttcctcagctttatcaagaacgagaaatgtcaggacgcctctgtatacacggccgccggcacacacttctatgaacgcgggacggtatgtgtggttatcaacaccttctcttttgtacagataggttgccgcttcaaacgggagcttgtacagcacgccttcagttcgtcccccgtcttcaacaagatcggctctggaaccgtcaggacgccttaatgtgaatctcgtcgaatacccttcaacaaccgcccctccgaccggctcggcaaaaaagtggtcgacccccgcctgtttaaaccgggcattgtccatacaggagccgtatgcgaaataataaaccggactgtcattctcccgtttcataaaacggtattctttccagtctccgcttttgatacggctgaatgaggcacactggtcgggctttacgacatatgcgaaggcggttttattcccggcatccgtcgtcacggcaacctcttttcgatcaaaatcagcataatacgcatccagcttacggatcatctgatgatctgtttcatacaattccccgtacacaaaagctgtttctgctaaagacgccgcaggctgacctttatccgtttcgtacagcacgccgtttatcgcagcctgctcgcacacacacggagcgcctttcagcagttcatggttttcttcacgcttccgtaacaaaccgtatacaaaaagaagcaagttatttttcctccttttggacagcagccgcttctaacggcagaatcacctgaaacgtactgccttctccatttttgctcttaatgttaagtttaccattatgctccttcagaattcgtaaacaaatcggaagcccgagacccgttccctgatcttttgttgagaaaaacggtttcccgatgttttcaagcttttctttcgacatgccgtttccttcatcctgtatgctgatcaccgcgtattcttcatcccgttttgtataaatatgaatattcccgccgtcaggcatcgcttcaatcgcatttttaataatattgataaatacctgtttcagctggttttcgtcaccgttgaccatacaggactcagtctgcctgaaatccttctcaatcacagtgttcgacagcaccgcgttcgtgtcaagaagcgtcgccacctgccgtaaaatatggttgagatgatgagcggtaaacgtcacggtctgcggcttggcgagcagaaggagctcccccagcacaaggtcaatccttttaatctccgaaaaaataatatcaaaataatccgttctttccggatactgggctttcatcagctggagaaagccgctgactgatgttaaaggatttcttacttcatgggcgattcctgccgcaagctccccggcaatggccagcttttgagattgcatggcaaggcgttcgttcgtttccagaagctcgtcgaccgcttttttccgttcactgatatcagacatcgtccccaggcttccgacaaatttctgtctgcggtcataatacagcttataatggacttctccccaaaagatcgagccgtctcttttaatatatttggccgtaaacattcctgacggggactgctgcttgatttgggagataatataatcaatgatatgtttttcttttataaaataatcattatacatcgtgcccatacattcgctgatggagtggcccgtaatcgccgtccaggcctgattcaaatatgtaatattcccttgagcatccgtctgaaaaacgatttcctgcagattgtccatgatccggtttttctcatctgaaagcgcctttgctttctgctcgctgtccttcagctccgccagcagctgctttttattatccacataataagccagcagccagacgctgattaatgtgacggcggtaaaggtgatgtcaacgggccagttaatcggattccgttcaatcatataaaataaataatcccaaaacataataaaaatcattgccaagattaaggaaatgatacgcgcttgatattttcccatagtcccacctgccgctagcatttctacatatattgtaacattgttgactgcattattgactaaaaaatgataactattcccaattaattgagcaggttcgcttacttttcccgtgagtttttgcacaagttcataataaaaggacggaatgatgctccgccctttttgctgattatgatctatcttttaacgcttcctcgatttcctcaagcagcattttcgctccttcaggacttaaaataattttgccgttgccgtactcctgattttcgggagtaatttcccccgtcattaagcaaatgccgtgcggcttgtattttttcaagacaattttgtctccgtcaacgaaaaattcaatactatctttaatagcgatatccaatgctcttctcaattcaatcggcatgacaatacgcccgagttcgtctacttttcttactacaccaattgatttcatagaaatcccctacttcctttaatgtctcttctttatgtccaaggaaaatccttcataaacgtagacgaaaggaacggagcaaaagtttctcagcatccggaactgaatgtttttttacaaaagaaaatccttttgaaatatgggatacagactttccctccttttttacaaaaacatttcattcccggcggaaacccccaaaaatcgtggtttttctcagaaactttaaatgtagaatcaattaaatcaggatagggattgggtgaaaacatgtttcaatcaactgagatcggaatcgacttaggaaccgctaatatacttgtttacagtaaaaataaaggaattattttaaacgagccttccgttgtcgctgtagatacaacaacgaaagcggtgcttgccatcggaacggatgccaaaagcatgatcggaaagacgccggggaaaatcgtcgccgttcggccgatgaaagacggtgtcattgctgattatgatatgacaactgacttattaaaacacattatgaaaaaagccggaaaaaaaatcggaatgactttccgcaaaccgaatgtcgtcgtctgcacgccttcaggctcaacagccgttgaacgacgcgccatcagtgacgctgtcaaaaactgcggagcgaaaaacgttcacttgattgaagaacccgtagccgctgcaatcggggccgacctccctgttgacgagccggtcgcaaacgtcgtcgtagatatcggcggcggtacgactgaagtcgccatcatctcattcgggggcgtcgtatcctgccattcgatcagaatcggcggcgaccagcttgatgaagatatcgcctcgttcgtcagaaaaaaatacaacctgctgatcggggaacgtacggcagaacaagtgaaaatggaaatcggatttgcattgatcgaacatgtgccggaaacgatggaaatccgcgggcgtgaccttgtaaccggtctgccgaagacaatcagactgcaatctaatgaaattcagcacgcgatgcgtgagtcgctcctgcatattcttgaagcgatcagagcgacacttgaagattgtccgccggagctcagcggtgatatcgttgaccgcggcgtcgtgttaaccggcggaggctcccttttaaacgggatgaaagaatggctgacagatgaaatcgtcgttcccgttcatttagcggcgaatccgcttgaatcagtggctatcggcacggggcgttcattagacgtcatcgataagctgcaaaaagcaattaaataataagattgtgcttcttttttctccggccggctcatattgtgagaactggagaaacattaaggaggaagcatatgcttagagatgtgggaagacgcgtagcagtagccgtcattttaagcggaattattttggggggtatgagcatatcactggccaatatgccccattctccggccggcggcgccgtaaaactgaatcacccgtaaagacgcagcaaaagctgtgtctttttcgtttgtgctcctttctttcctttatgaggcgatatttgatatgatgagaaaaaccgatgaggaggaatgaacgatgagttcgtttactgaaaagttacatacatatgctcagctggcggtagaagtcggcgtcaatgtccaaaaaggacagcatgtcgtaatcaatgcctcaactgatgtccgggaacttgtcagactgcttgccaaacattcttatgaaaaaggcgctaaaaacgtcaccgtaaattggcaggacgatgaactgtccagattaaaatacgagatggcaccttttgaagcgtttgaagagtatcctgaatgggaagcaaaaggaaaagaagagctcgcgaaaaaaggggctgcgtttatttctgtcgtctcatccgaccccgacctgttaaaaggcactgacggcaaacggattgcagcgttccaaaaagccgccggaaaagcattgcatacatacagacaatatattcaatcagataaggtcagctggacggtgatcggagcggcttcaacaggctgggcgaaaaaagtgttcccggatcagccggaagaaacagccgttcagcttttatgggaagaaattttcaaaacgacccgcgtaaatgaagaaaaccctgtggaagcatggaaaaaacatgatcaaaaccttcatgaaaaagtggaacacttaaacaaaaaacattacagcgccctgcattatcaggctgaaggaacagacttaaccattgaactgccgaaaaaacatgtatgggcaggcgcgggaagcgtgaatgagagcgggcacgaattcatggccaacatgccgacagaagaggttttcaccctcccgcagcgtgacggggtgaacggcacggtttccagcacgaaaccgctgagctacggcggcaacattattgataacttcactcttacctttgaaaacggccgcattgtcgatgtgaaagctgaaaaaggcgaggagattttaaaaggcatcgtcgaaaccgatgaaggctcacactatctcggtgaagtggccttagtgccgtacgattcaccgatttcacaatcaaatattctattttacaacacactgtacgatgaaaacgcctctaaccacttggcgatcggcagtgcgtatgcctttaatattgagggcggcaaacaaatgacacgggaagagcttgtcaaagagggcttaaatgaaagcattacacacgtagattttatggtcggttccaaagacatgaatatcgacggcattaccgcggacggcaaaagagaaccgatcttcagaaacggaaactgggcattttaataaaaaaaggaggcgatcaggcctcctttttttatttcgcttcatacatttgcaagttggcgcagacggtttccaaaacaggtgtatcaactgacaagcctttcgctttctcaagcaaaaatccgtgtaaatgatcaccttccgtcaccctgcccttttccatatctctcagcatcgacgatttcatatggaaagacatgcttgtcaatgtgcgataactctcttcttccagatcaggatctttcgggatgccggcagccttgaaaatggcgccgatttcagcaaagaggcgctttgccgtgttgcggccgccttctgtttctaaaatcggtccgaccggctgttgaaacagagtggtcactcccgcctgcgcggcaataaacatatattttttccaaatgtccttttcaatatcccggctgatgatgacatccgctttcacacctgcaaatgcgttttccagctcattcatacgttctgtgcgttccccgttccattcaccgaaaacaaagcggtgggcagcgctcgtatgaagaatgtcccctttgtcgttaagggcgctctcaataaagcagaggccgcccagcacctgccgttttgaaaaagcttcaaacagctggttatagtgcctgtatccgtttaaaaaaggaataatgaccgacgaaggtttgacaaacggtttgacatcccgaatgacgtcctgcaaagaatacgcttttgaagcgatgataaccacgtcaaatgctccttcttcgcccgccatgattaatttcggcttgattgaaacatcacctttttcacttttgacggtcaatcccgtctcttgtaattgttccgcccgtttcttgcggacgagaaacgtcacgtcatttcccttttctgcaagacgcgcgccgatatatccgcccactcctccagctccgacaactaaaaacttcatgatgcattcctccgtctcttttcaagttatgtattcatttattgtaacgggaagtcagaagattgaaaacttttttcataaataaaaaagcagagtctcccctgcttctttattacgcgtatagctcttcaagctttttctgtacatccgtgttttcaagaaattcgtcataagacatttgtttgtcaacaatgcctttaggcgttaattcaatgatgcggttggcaattgtctgtacaaactgatggtcatgagatgaaaacagcatagcgcctttaaagctgattaagccgttgttaagcgccgtaatggattccaaatctaagtggtttgtcggttcatccagaattaaaatattcgcgccggaaagcatcgcttttgaaagcatgcagcgcactttttctcctccggaaaggacgtttgattttttgttgacttcttctcctgagaacagcatgcgtcctaagaaaccgcgcagaaagctttcgctttggtcatgcggcgagtactggcggagccagtcaacaaggttcgcgtcgctgccgtcaaaatattcgctgttgtctttagggaagtacgcctgagaagtggtcacaccccatttaaatgtgccgctgtctgcttccatttccccggaaatgattttaaacaatgtcgtaacggcaagttcgtttcggcccgtaaaagcgattttatcttctctgttcataataaagctgacgttatcaagcaccttaaccccgtcaatcgtttttgttaagccttcaacccgcagcacgtcatttccgatctcacgttccggcgtgaaattgacataaggataacggcgtgatgacggtttgatatcatcaagcgtgattttatcaaggagtttctttcttgatgtcgcctgctttgatttagaggcgttggcgctgaatctggccacgaactcctgaagctgtttaatctgctcttcttttttcttgttggcttcctgagaaagctttaaagcaagctggctggattcataccagaaatcatagttgccgacgtacacttgaattttattaaaatcaagatcggcgatgtgcgtgcacactttatttaaaaagtgacggtcatgggatacgacgatgactgtgttctcaaagttgattaaaaactcttccagccactgaatcgctttcagatccaagtggttggtcggttcatcaagcagcagaacgtccggcttgccgaacagcgcctgtgccaaaagcactttcaccttttctgaaccgcctaagtcagccattttcttcgtatgcaggtcttcagagatgcccaggccctttaacaaaatagcggcttcactttcagcttcccatccatttaattccgcaaactctccttcaagctcagcggcgcggatgccgtcttcatctgaaaaatcaggcttcatataaatcgcgtctttttcctgcatgacttcgtataaacgtttatgtcccataatgacgactttcagcacttcgaagtcttcatattcaaagtggttctgcttcagaatggcaagacgttcgcccgggctcatatggacatcgccggtctgcggctccagctcaccggataaaattttcaaaaatgttgattttccggcaccgtttgcgcctattaatccgtagcagttgcccggcgtaaatttaatattgacatcttcaaataacttgcgatccgcaaaacgcaagctcacattatttacagcaatcatttagaatcctccatcgtgtctatcatcattaaaagtataccatgaataaaggggaagagaaatgtttccctgcgaatatacgggtttgaaaagatgcaggcaaacccggagcgctgtgatacaatagatatatatacatattcatcacggaggaacaagttgaagcttttaacactcacagaatattgtcttatgattttctttaccggggtttttctggccgtcacaggctttacggcacgtgacatcggcttgtacgtcggaatcgccctcatttatacgttttcgcatctcttttcaaaacggatgcttgaaaaacgcggcaaagagaagcagcaggtgaatctttttttcagcgttctggccattgtcggatcagtgctggccacggtaatgttcatcgccatcgccgcctcgtttgccaaataaaaaacgcctgctgtccaaatcgggcagcgcggcgtttttattttgtctgacgcatatcatgaaacgggaagaacacaaacttcgaggtgccgacgatccggttttcggcaattaaaccgagtccgttccggctgtccattgagttcagccgattgtcgcccatgacgaagtatttgcctttcggaacctttacggggccgaaatctcccgtcaggttgactcccagttttttcgcttcttttttattgctcgcgaggtacggttctgcgatttttttgccgtttatataaagcgtgtcatttttcatttccaccgtttctccaggttttccgatgagccgctttacataatggactttcgatgtatcgccgttaataatgacgatgtccccccgctcgatttctccgatataattgacgcttttgttgacaaacagcctttcaccgtcatgtaatgtcgggtacattgatgatccttccactaagtacggttcaaacaggaaatggcggattaacagcgcaagtgcgactgctatgatgatggcctttccccattcccaatatgtgttggattttctttttaccgatttttcagaagtaggtttttgttcttcagtcaacgtggttcctcctagacgatcactgtttcagttcatgtaccatctttactttatcataactcatcataaaatacataacgcttctatgcgtacatgattgaaaaaagcgcccgtaaaggacgctttttgtttatttctctgcaaccggttttttgacgattcccaagataaccgccgttacaatcgctccgatcacgatgctcattaagtacagcagcggatggttcgtaatgaatgcaacgaatattcctccgtgcggtgcaggaagcgttacccggaaaaactctgtcaacccgcccgctaccgcagaaccgacaacggctgcagggatgacgcgaagcggatcagccgctgcaaacgggatggcgccttctgtaacgaaagctgctcccatgaagtagcacgtaataccggcttcacggtcacgtttagagaatttgtgtttaaagaatgttgtcgccagtgcaattccaagcggcggagccattccgcccgccatgatggccgcatgcggcgcatagtttccggcatcgatcatcgcaattccgaaagtgaacgccgctttattgagcgggccgcccatgtcgatagccatcataccgcctaaaataatacccattaaaacaaggtttccagttccaaggctttcaagccaatttgttaagaaattcatgaacgctgcgacaggtgtgtttatgacaaattgcatcagaactcctgtgataaaaataccgagcagcggataaatcaatacaggttttaatccgtcaagagtctgaggaataaagacaaacagctttttcaaaaggactacgacataaccggctaagaatccggcaatcagtccgcccaagaatccggcattcgcctgcgtagccataaatccgccgaccatacccggcgcaaatcccggacggtccgcaatactcattgcaatgaatccggcaagaactgcaacgatcagttttaacgcattatcgccgccgataaagttcagcgctgcggcaaacgtgttgtatgtcgggtctttcggatcagctgaatgaattccccagaagaatgaaatcgcaacgagaattccgccgccgacgacaaatggcagcatgttgctgacaccgctcattaagtgtttatagaaagtacttccgatgcttgtgcctgatttctgtttcgggccgtcttcatttgaagcggaagatcctccgccgctgccctcgtaaatcggcgcatcttggttaacggctttttcaatcagttcctgaggacgtctgataccggccgttacaggcacttgaagaacatgtttgcctttaaagcgttccatttcaacctgtttatcagccgccacgataatcgcaggcgcgtcttcaatttcttgagccgtcagcttatgtttgataccgcttgagccgtttgtctcgactttaatgtcaacgccgagctctttcgctttttccttcagtgcgtcagctgccatgaacgtatgggcgatacctgtcggacatgccgtaacggcaaggattttgccctttcctgacggcgctgcctgttcttcctgctcttcttcttcctcatcgtcatctttgtcatgctgattgatgatgtcaatgatcgcatcttctgattcagcttcaagaagctgtttgcggatttcctcacgcatgagaagcgttgaaagtcttgataatgcctcaaggtgcgtattattcgctccttcggttgccgcaatcataaagaccaggtgtgccggctgaccgtctaatgattcataatccacaccatcttttgaacggccgaatgcgatggccgggttaatgacgctcgccgtcttcgcatgaggaatggcaatgccttcgccgattcccgtcgagctttggctttcacgatttaaaatggctgctttgtaagcctctctgtcatttaatctgccggctttgtcaagcactgtcaccatttcatcgataacgttttctttctctttgctttctatattgagatgaattgtatctcttgttaacagctcagttatcttcacttttctttcctcctctatagacgtgtgactttaacttcaggaagaagctgctgtacaaactcttcagttccgagttcttcagaaaatgccgtcgcgcttccggaagcaactcctaaacggaacgcatcttccaaaggcagctgttttgaaattcccgcaaggaatcccgcgacgacggaatcacccgcgcctaccgaattgacaagctttcctttaggaacattggcgaggaaaaccgcctctttcgtaaataaaagcgcaccgtcgccagccatcgaaacaatcgcatgttcagcgccttgttcaatcaattttttaccgtaaggaacggcagcttcggctgaatcaatgaccgtattgaacatttccccaagctcatgatgattcggcttcatcaaaaacggtttcatttctgtcgctttcatcagcgcttcaccggagatgtccaccactacccgggcattctgctttctgcatgcctcagcaattttttcatacgtattatgcggcagggaagaaggaatgcttcccgctaaaacgacgatgtctccctcttccagagcggagaactgttctaaaaaggcattgaacacttcgtctgaaatcgtcgggccctgtccgttaatttccgtttcatcgcccgttttcagttttacatttatacgcgtgtcttcatccacctcagaaaaagccgtttccagaccttcctgctgcaaaaatgacgtgatataatttccggtaaatccgccgacaaaccccaatgcttttgacggcacatggtgtcttttcagtaatctcgaaacgttgatgccttttccgccgggatacttcgtgtcatagctggaacggtttaaaccgcctacggcaaaatcttcaacgtgaacgatatagtcaacagacggattgagggttacagtgtaaatcatggtttcactacctttacgacagttttttcttggtaattatcgaatgcaagttcttcagcttcagtggtaatgatagcggcatcgcccaaggcggcgaacgctgcgaaagaaatctctccgaatttagaaggatcggctaaaacatacgcatttttcgcctgtctcacagcctttgtcttcagaagagcctcatccggatcgggtgttgtaaagccggcttcaatgtgcacgccgttcaccccgaggaagcttttgtcaaaacggtactggctgaccgcggttaatgaggcgccgccgatcatcgcacctgttctatgcttcacatatcctccgagaagataaaagggaatccctttccttattaaagcgtcgatatgcataactccgtttgtgacaaccacaatgtccttagatggatctataaaatcaatcatgtgcaatgtagttgttcccgcatcaagataaatacagtcaccttcttctaataaagatgccgcttcttctgcgatcttcagtttaccctgaaggtttttggaggatttttcaagcatatcgggttcttgcctgctgttggaaagtttagacgccccgccgtgaacgcgctttaaaaatccgcgctcttcgagtgttgataaatctcttctgatcgttgattcagaagcatttgtcatgcttatcagctcttgaatcttcaccacatcacgcttttcaatctgatcaataatcagctgatacctttcaggagtgagcatattccgcctcctttggaaacgtattcatttcggctgcaagataattgtaaacgctttttttacttctagcaactaaaatcactcaaattcattcaataactatcaaaatctttcacatttgttcatattaacgtatgtacatagggtttgtaaactgtaaattcgacaaaaagggggacaattgtatgacattttctttttatcataaatgaaaaaagtctattatattcatgcaatcattaaaacacaaaaaaaccccatgcagactgcatggggtgccggttattcataccgtaacgcttcaatcggatctaagcgagatgctttgttggcgggcagcatgccgaaaatgacaccgatcagcatactgaacagcacaccgatacaaaccacctgccaggaaacgagcgacggccagcctgcgataagggaaacgagtgatgctcccccgtagccgagacagattccgattaagccgccgattaatgtaagcacaacagattcaattaagaattgtgtcagaatctgtcctctcgtggcaccgagcgatttgcggatgccgatttctcttgtccgttccgtcactgatacgagcataatattcatgaccccgatcccgccgacaacgagagaaataccggcgatcgaaccgatgatcgtcgtcatgacggtcgtgacctggccgattcccgccgcgatttcttccatattcatgacttgataggcctcttttgtaccgtgattgtcatttaagagacgggccgcttcttttcctgttgatttgatttgatcagctgactccgtctgaacggaaacgttgctgtagtcgttagtaccgaaagacgttttcagcatgttgaacggcacatacatttcactgagtcctaacgataaaaagccgctctcttctttcagtacgccgattacttcaacgggctgtccgccggcccagacgatttttccgagcggagacgttttcccgaacagcttttcagccatttttttcgagatgattcctgctcttttcccggaaagaaaatcattatccgtaaatgtccgtccatcttgaacgtccagcttttttacgtccatgtagccgctgttaatgccgttcagcgtaatatccgtgtcttcttcatggtaacgggccgtcatggattttaccgcggaagcgacaacctgctttacgccgtccactccttttaatccattaatatcttcttctgtaaaactcgcttcctgtaaggcgttcggattggctgttaattcttcatcactgggcatgtaaaacaattcaatcgtattgcccggcccgctgatggattgcttcagcatttgctctccgccctggccgacagccacaacaacaattactgaaccgacgccgataatgattccgagcattgtcagaatcgatctcagcttgtgagctcttacggaactgagggccatccggagattttctaacaggctcattcccccactctcctctgctcagcatcgcgggaaacgatcatgccgtcacggacgaaaatcactctgtttgtacagtccgccacttcaggctcatgagtgacgagcaccacggtcacgccctctgcattaagctctgtgaactgctccataatggaaatgcttgttttcgtatccagtgcgccggtcggttcatcagctaaaatgagcttcggttcgttcacgatggctcttgcaatcgcgacacgctgcttctggccgcctgacagctcattcggcatgtgacgcatccgatccgccaaaccgactttttccagcgcatgctcagcccgttcctcacgctcttttttgccgataccggcgtagatcatggggagttcgacattttttcttgcattcaatcgcggcagcagctgaaactgctgaaagacaaatccgattgatttgttccggaccgccgcaagctctttttcagtgcatgaagaaacatcttcgcccgcaagcctgtaactgccggacgtcggtctatctagacagccgatgatattcatgatcgtagattttcccgatcccgacggtcccataattgacacatattctccttcttcaatcgtcaagtcgattgaacggagaacatcaaacgtctccttgccgatctgatagctttttttcacctttgaaagctgaatcatctatgctttcacatccgttccgtcagtcaaaccgtcagccggattcagaatgactttatcatcctttgaaagcccctcttttatctccgtaagctgatttgcggtatcgccgactttaactttcacgcgtttggccttcccgtcttttaccgtaaagacccagtgctcatctccgtcttttttgactgcggaggacggcagcgtatcggctttccgtttgtcggtttcaatgttcataattaatttaaatcccggtttgccttccggaaggtttccgatcagcttaacctgaaacggatactggacggcttgttccgtgctttcccccgaagcagcgcttgacttttgatcaggaacgaggccgacagccgccactctccctttccacgttttacctggaatggcgtctgaggtaatcgtaacgctttgtccctttttcactttcagcgtgtcgtattcggacaaattgccggcaacgatcaggtgttccgggtctcctatatgtataaccggttcttgaatatccgattttttagaagccgcttcttgatttaccgagattaccgtcccgtccatctcactcttaacattgagattcgccacctgattttcaagagactgcttttgcaaatcagattgctttaattcgatttccgccgttttttgctgaagctgcagatcagtccgttcggattcaatttgttttttggcttccgcttctcccacttgttttgccagatcttgttccttgctgtttaatgctctgagtttttcttcaacttgttcgatttgcatccgttttgattgttctgtcaactcattttgttctttatcaagattgagctgctcatttgtatatgtgactaacgacgaccctttttttactttgtcgccttcttttactttcactttatcaagagttcctttatccgcttcataaaaaacatactgttctttagagaatttaagtgttcccggaaccataaccgtagaggagatttctctgttttccatggttccggtttcgatttttttcccggcgctgccgcccgcgggagcggcagacttataaatattgataccgatgaatactgcaacaattacggcgatgccgattccgatccaaatttttttcatgttatacacctgctgtcactgaacttaacagtcctccgactgccgaaactaaaagcataataacaaacaggacaatcgcggaagtccaggccgcttttttcgaaatgccgcctgtatagcgaagtcccaaagcgagcagaatatagctccagatgctgaaaatgtcgaacgcgcttaaaaagaccgcgacgccgtctccggccggtatgacactcgccaaagatgtaacggcatacaatgagcccgcaccggtaaaataagtgacaagaccgttaataactaagccgatattggtaataaatgccgtaaacaggctgagtgagagcatttttttgtaagttgtcacgccgcctgaaattttgacgcacagccagtaaatgagcggaacgataaacagagcgataatgcccccgaagattcctccgaacatcgagccgaatttagcgaaggttttggtcatttcaatctgatcatccgtcaaaccgtcaagagatgagctgttcagcacttcttcataattcatcccaagcccgcgcaaaatactgccggccgcgataagaatgatgacaatcaggagaggaatgccgatgaccggcttttcttttaatcttttaaactgcacaacaggacttgtaatgacgccgaaaattgacggcttttccgttactgccgtattgcttttttccaggtttggttccatattgctgatgcctcctatgtattattctgtttatacgtacgctttaggctgagagaagtttcaatttttttgccgtttgcgtatttatgctaaattgtaacacaaattctcagctttacgttccataattatgtaaaaaaaagcattgtcagatccgtgcgacgggatgctcaaagccttgtgaaggcactgtcttcagcctattcatgcagtcaaaaccagctcaatcacaaatccctttaaatccctttaaatcccatttaaatattctctggaattcagcgcctatatacaaaaaagccggatggcaatgatgcacatccggctcttttttcaccctccgcttacaggagggataaaggcaatggtatcaccttctgttacgatgctgttgtcttttacatatgtttcattgattgcgatcatggcattgtcaatcgtctgaagtccgtaccgttcctttaacagtgtttttacagcagacgccgccgcctctttttcgtcaagttcaatgaccggtgttcccgcctgctccgcaagcccggcaaacaataatactttaatcatcgcgattcccctttatgcaaatccggttttccgttcggatagggcgttgtttccagctgatcgcctatccattcttcgccgtcttcccagatttcttttttccatatcggcacaatctgttttatccgttcaattgcatattcattcgcctcatatgccgcctttctgtgcggtgaagacacggcgattacgaccgctgcttctccgatatcaaggacgccgacacggtgagtgattgcagcttcggctccttcccatttcgcgctgatttcatcgccgatttgagaaagcatttgaacagccatcggttcatacgcttcatattcgagacgcaccgtccgccgtccggcagtccactctctgaccgtgccgataaacgttgtgatggcgccggcttcacgcttttcaactttttttacgatattttccgcaatgataggttcccttgtaatttgaaaacgttccatttatgcagattcccctttcagctgcgaaagcacaaacatcatggcagccggatcgtccgcatggaatacgggcatgcctgcatctgccggcatatactccgtatttctgctgataaccgcgatcacgcgctccaaatgcttcagcttttgccaatcttcgctgtctttgatcataatgattttcggatgcggcgcatgtttaaatccctctatgagaagaccgtcaattcccagacattcatacagactgatcaaacccgccagatcccatttttttcgcgccgtaagctgcaggacgccgtccccttctactgccgtaaccgcggctccggcttttgaaaaacgctccgagtcttttccgtcagaaaaaggttccggttctccgccatgtccatgatgttttaaacatccaatatcgcactctttcggcgccgctttcagcacacgttcaataaacgttgttttaccgctgttttgaaaacctacgatctggacgatcgggaaagaattgaccacggccattcacttccattctcatcacggatgaggagcacgtgaaccgtccggcccgcttcatatcccctcgttcctcccggcagaaggataaacgcgtttgcttcggctagagatgtgactgagcttgatttgtcgagaccgaccggtgacgccatcatctttccgtccttatgataaacaaatgccctcacaaatctcgtaaacggattcggtttcggaaagtcgtttgttaacacggcttccgcccatccggaatgaggtttttcattcagaagccacgtctgaatcatcggtttgacaaacagggtgaatccgacataacatgcggacggattgcctgaaaggccgaacagcagcatgtcatcggcccgggcgacagttgtcacgctccccgggcgcattgccactttgttaaaaagaacttccgctccgagcttattataaatgtctggaagaaaatcaaaatcgccgactgacacgccgccggtcgtgatcagaaaatcaacttttttcatagcttccttcaccgcatcatagctgtcatcaaaatcatcggaaattttccctaagttcagcggcaccgcgcccgcttcaatgacctgggcatacaccatcgcagcgttgctgttgcggattttccccggctcaagcggatcgctgacatgaagaagctcggtccccgttgctataatgccgacaaccggctttctgaccacgggaacggaagcatagccgaaggttgctaaaagagcggttacgcccggcgtgattttcgtccctttttttaatagcgagctgccctttttcgcatcttctccttgatatgaaatattatcgcccgcatggaaagggcgtttcactgacatgtaattcgtcccgttttcagaaaacgtttttgtcagctcaagcatcactacggcatccgcgccttttggaatctgcgcccccgtcataatgcggaccgcttcataagggccgagttttttttccgatacggcgccggctccgatatggtcaatgacttcaaaggtgacggcattgtcacgggaagccgtttttgaatcgctcgccctgatggcaaacccgtcatacggggaacggttaaaggccggcacatcatgatccgccttaacatcctccgccaaatagcggtggagactgtcctcaagcgccacccattcggtatccccctgttttttataccggctcacccggcggactgcttcgtccacctgaatcggcgttcttttttcaagcatagcaatatctccccttcctacagtccgatcaccctggccagaactgaatttgcttcttttatatcgtttgtaccgtgaatcaaagcccgtccgtcctgaaaaataacgattctgaagcgctcatacgccatgtgcagcagaaattcatttgcttccactttaccgatctgcttcagacgtttgacaagctcttctttatccagcctctttaaggcttccgatctgatttgaacggtgtctctcccgcacagcacgcttgctttcggcctgttttcaggctgcagatacggatatacgggctccgcgccgcaggaagggcaatgatcccgtttgatctgatccacatttatgctcatattggtgttattccacacgtcaaacgtgaaaaagcgccgatttaccgccgcatgatttcctgtcagcaatttcagcgcctcagcctgctgataagcagagacgatatgaaccgccggaggtatgatacctgctgtatcacatgtcgctccgcccacgggcatttgctcaaacaggcaggataaacacggcgtaacccccggaataatcgtcatgcacattccctgactgctgacacaggccccgtaaatccaaggtgttttcgttttcagcgccagatcattgatgaccattctcgtttcaaaattatctgtcgcatccacgatgcaatccgcttgttcgatcagcggttcgagcgtttccgccgtaccttccgccgcgtaagcatcgatatgtatatcactgtttaccgccaaaagacgcgccttggccgccattgctttcggcaggcgctgtctcgcgtcttcttctgtatacagctgctgtctttgtaaattgctccattccacataatcccggtcaataatcgccatacggcccgctccggctcttgccaaaccctctgccgcggctgttccgagagctccggctccgacaatcaggacactgctgtcagccagcgcctgctgccctttttcccctatcggcttaaatcttgtctgccgcgaatagcgctcttccatctgtgttgtccccttgcatttttatttccatcataccatgtttcttcccgatcagtcttgatttgaagactcgacatgcgccaaaagtctggtgtaatcgtcccgtgtgttgatattagcgaactcctccggcccggcgccgatgtcttcagcctgcacataacagacagacagccgtttcagcgtgtctgtcattttcagtttgttttgtgtcagctgatcaaaaagcacatcctgcacccgtttatggtaaaccgccaagaggggctgctctctgtttttacaaaccggtatgacagcgtccagatttcccgtcagcttcatttcaagcgcagccatcgtttttcttgtcacgagcggcgtgtcacaggatatgaccgtatatgtttcgccttccgtttgtttcattgccgtatatatgccggcaagcgggcccattccccgaaaccgcggctcatcggccaaaacatgccgctctctgtttgataagaacttttttatatgctcagggcggctgataattaccgtttctccgccgccgaaggcttttttcgcctgttcataaaacatgccgcccttccactttgcaaaagctttcggttctccgaatcttcgggaagctccccccgctaatattacattcacccgtttcatgtcatctctctcccattctatataaaagcatagcaaacgcctcagccgaaatacaatattacggtgcttgtctgtttaattaagaggaatagccgttgatcctttcccatattgtagtgttaacatcatgagggagatggttcttatgaaaatatccggtccgtttttccacgacacttctcaagagaacctttacttgaaatccgaactttccagatgcagaaaattaatttcagaatttgaagcaagctacttccatcagaaaaataataagcttcaggaggaaaacgccaatattaaagagcggcttcacaagctttctgacgaattggaagccatggctcaaaaacacaaacagacaagtgacacggaacgttctttgcatgaaatcagagccgggctgctcgataaaatcgtcattctgcaagaactgcttcagcaggaaacgtttcggcggaaaaatgagatggaagaaaagcaccgtctgcatcttacaaatgtaaaatttgaagaagaaaataaaaacttacatacccgcatccgctcacttgagaccgccattcaaactgaacggacttctcacgaagatatgaaacagcgttatcatgccgctgcagacgaaaatacccggctccaaacacaaatgatagaaaaagaataccagcttaaacatattaaaatagaaattaatcatatgagagatcgaatactagaaacaaaagaacggcttgtagaaatagaaaaaacgaaagaaaagttatttcaagaaaccattctttcgtataaacggcagctggacgaaagtgatgcttggattgccggccattttgctgatattgacagccgcacggcggaaccggcggaacaagctctggaaatcccttctgtttccaaagagactgttcaggcagaagacttgcttaaagccgttaccgaacaagtcatctccctgcaaaaacaatttgtacaatcagagtcccgcgatcagtcgtttgatgaaaaactggatgcgttgaaagaacgtgctgacggcgaaaagcctttccagaaatatgtcgtcaagcttgaaaaaaagcctggaaaagaggcgtcacttccgcagaataagcgggaaagcgcaaaaaaactgcttgagtaacgcaagcagtttttactgttttattcagcagccgtatcatttgccgtttctgctgtttcctgagaaatttctccctcaagaatatattggccgcggtatggttttttcacttccggatacattttaattaagctttgcataaatgttgtcatattaggaatttcaaggccgctttccttttcaatttccttttgcagttcggaacttttaatcgctgcattgtggcgtttcaatgttttaatcgctgcttcgcgcagttttgccgcttttgatcccggtctcgccgtccctcttcttcttcttgtagaaccgtctggaatgccggcgggaagagacgtaatagactgcatctgcggctgggaggattgaggctgtgcctgcggcttttgatagcttctcatttcctgtgctgcaagctctgcaagcaccgggagagagtcactttttttctccggacgaaactctttttttgtatcggacaggctgcctgtattgtctaattctctcagttttgcatatattttatcacgttctatttgatattcacgaatgacttttacctctgcttcgttcaattgttctaaacgtaagcgcagcgcttctctttcattaaacatgtgtaaaaccccctgtcaaaaatttaaacgcttttattaagatattagattacaaaagtaattttatcaactattattttatcattttactattttatttactctatgaaaaattgcttattttctgaaaatggtactttatatacaaaaatcccttatcatataggggattctggacaaagttccaatttattcaaccatttcaaaatataccttgaaattacttgtttaatgaaaattagcgtgatatctacaattttcgactataatatgtaaaagataatgatatcgataaaacaagcggtacagcgtgtttacggctgtttctcttattttttaagccgcacatgtcatattggaattttttatccaataggcacaaaaaaaccctgttacctaaacggcaaagggtttgcagaaccgagacaatagtccgacggagattgtcccgattactcagaagcctgctccgtttctgaaagtactcggctgacgcgtttttcaagcattttcatcccgcttcctcccgcttgaaaatggcggagctgtccggttttatcgaaaaggtaataagccggcacatattcattttcaaatgcttcagtcagcgtatgatcgctgtcgacgtaaatcggctgagagatatcgtgtgcagttgctgtttccttgattttctcaaggtcaagatcgtcttcggaacggggcatgtgaacggccaccacattcagctgatctttatatttatcacgaaattcgttcatctcaggcatcgcttctttacacatgcggcagctggcggaccagaagtgaatcagtgccggctttccgccgaccagctgttccttcgtgacttctctgttaatccatgctttagcgcctgtcaattcaggcatttgctgacgtaatttcatcttatttccctccttatgaaaaaggttttttgccggggctttcagttccgccgggcaacgttctcctgttttccctccaaaggatatgatttggctgaatcaccatgttaaaatgagtgtggcgattccttagttcatatcttcacaaaaatgatgatattgaaaccgggcaatatgaacaaatcataaatgaaataactggtttctattaaaaggtttatcttattttaaaaacgggtatatcacttttagctttttccgcaaaagacttgaaaggaagacatcactatgattgatttaaaacactttgactgggccgggcttctcacatctgccgggattttcatcataaagctggctctcattattttagcgtactttattttccgggcggcaggaaaaaagctgatcaagcatctgtttcagaaattcgagcaacaaaacaacctctccacaggccgcgcttatactttgcgaagcctcgcgcttaatgtatatggatacatcttgattttcgtttttatcgtaatgattttggatttatttcactacaatccgagcgctctcattgccggcgccggcgtggtcggtctcgcagtcggcttcggggctcaggggcttgtcagtgacatcgtcaccggattttttatccttttggaaaaacagatcgacgtcggcgattatattacggttgccggttacagcggcattgtcgagcaggtcggtctccgtacgacgcaaatccggagctttgacggcacgcttcactatcttcccaaccggggcattacgaatgtgagcaaccattcccgcggaacgatgcaggcgcttgtcgatattaaagtgccgcttgaaaaaaatcttgatgaaaccattcaaatcctgcaaaccgcgtgtgacaaagcagccgctgagctcccgcagattaaggaagggccggacgtcatcggggttcaggatttaagctcgtcagaaatggtgatcagaatcattgccaaaacagaaaatatggagcaatggcgggttgaacgcgtactgcggagagaaatgaaaatcgcgctcgaccgttttaaaaacgccgcttccgccgaatagaaaaaccgaagcgtaagcttcggttttttctttttaatgaaattttttttccacttcgctgcagatttcgtcggcggtcattccggaagccgtaatgacgggagcctgagttgacgtatcggcaattccttggacattgctgtcaagtccggttacaacacagcagtcacaattcttcgcatcctcaggagtcttcatcatcactacgtcatatcctttttgttttaacgcctgttctacatccgataaagattgttcaattccaatttttttcgtcatattgaacacctccgttatgtagaatgctcaatttttgttagattattcttcttttcggatttaattggcatacttcgaaaaatatccgaccatgacatttaccgcggtttccatcgcatcttcatccgggttcagcttggcgtgatgaagcccgtgggatgaatcggcccccagccagaacataaagccgggatattttttcagcatatatccgaaatcttctccggtcatcgcttctttcgccgttctcacgtcagcaagctgatgatcgctgacaaattgcataaattcttcggtcaggccgcttgtattataaacttgatgataaacggacggatacgtgacttttcctttgcatcggaagccgatttcaattcctttgacaagctcttcaatccgctttttcaccatacgcattgattcctcggaaagcgtccggatggttccctccagatgagcatgctctgcgatgatattttgcgccgtgcccccggtaatcgttccgacagttatcacagcgctgtcaagcggatccgtatttctggatatgaccgtctgcagctgcgtgacaagcgtgctcgcggcgacgaccatgtcgtctgctgtatgcggatatgccgcatgcccgcctttcccctcaagatcgatgacaagctcgctcgtattggcaaacagcaatccgcttttggtggaaattgtgcctacaggaagctcaggtgctatatggagagcggtaatcaaatccggcgtccattttttcagcacatcgctttcaagcatcggttccgctccgcccggtccttcttcagccggttggaataaaaagagcagatcatgtttgacgggatgatggacaaaatgatcaataatgccgagtgcgatggtcatgtgcatatcgtggccgcatgcgtgcataaaaccggggtgttcagatgcaaacggaagccccgtctgctcttcaatcgacagagcgtctatatccgctctgtaggcgagcattttttccggagccgtgccgttgactttgacaaagatgccggttctccaagtttcgatttcaattctttcctccggatattggttcaatagattcagcaggtactgttgggttttatattcctgaaagccgatctccggaatgcggtgcagatctcttcggatggcaatgagccgctctttttccatatgtattcctccttgagataagaataaggcgtggattttatcatccacgcccattctatcaaaccattccttacagctggcgtaattcctgtttgatttctgttttgccttttgttttttcatcaatatctttgatttttttcgcaggtgttcccgctacaacggtatatggctcgacgtcatttacaacgatggctccggcagcgacaaccgcgcctttaccgattgttacgccttcaagcacaaccgcatttgcgccaatcacaacgtcgtcttccacgactacaggcttagcgctaggcggctcaataacgcccgctaatacagaacccgctccgatgtggcagtttttgccgacagtcgcacgtccgccgagaacaacgttcatatcaatcatcgtaccttcgccgatgactgaaccgatattaatagacgcacccatcatgataacggcattgtcgccgatttcgacttggtcgcggataatagcgccgggctcgattctcgctttaacatcttttaaatcaagcatcgggatcgcagagttgcggcggtcattttcaatgacgtaatcctcaattttgtctttgttttcttcgattgcgcttttaatttcagcccactcgccaaaaacgacgccggattggccgttcaggaatgttttagcggaatcgccaaagctgattccttcaagatcgccttttacatacacttttacaggcgttgattttgtactattttgaataaatgaaataatttcatttgcatccatcattttcatatgtattgtcctcctctgattttctacctcattactgtaacaaaggaaggatacaaagacaagaaaaaaaggaacaagcctttattctgccggctggctgcacagcgcggcaaactgtcttccgaattcccggagctcttcttcctcactgccctcagggttgttttcaattttgaccgacggcagcaccacccgcccgccgcgggttttgattactttttccaattcgtcaaccgccccgcaaaaaaactcataggacgtatctccggaaccgaacaaagcaaatgtttttcccgtaaactccaggttttccatatcttcagcaatatcgagcatttcatcaggaagatccccgtctccccacgtatatgtgcctaataaaatatactcgtaatcattaaaaagttcggcatgaagatccatcgcttcatatctgtctacggatgcttgtgcttcgatcagccctttttcaattaaatccgccatcgcctcggtgtttcctgacattgtagcgtaaacaagcaatacattccccatcttcgtctctcctttatgcataaaaactaatgtgcgagccgtaccgcctcatacggtctgacaaacttactttcgtaaaggcccgcgcaaaaaaagttttcttcccggttggccacccgccatccgtgaccgcggatcgtatcaaaccactttaattcaccggcggcgagatcagcttgataaatacgcgaaaatccgttttcgtcctgtgacgatgtgacataaataatcccgttatcctcagaaacgtcgagaaatgatttttcccgtacggcgggcccggctgtaatggcaaactcctcttgcgtccgcacgtttcggacggcaacctcgccccgttctccctttgccgcgccctttactgcaatgagccagtcattctgatacatcatcattgaagccgtcatgcgctgcctttcgcggcttatacgccggatgcgttctttcttcagatcatacgcccaaatgccgccatgattcatatgaatccgggtgccgatataaatcgtctgaccgtgtaaacaaagcgaacggatgacaggcggctcctttaattgtgaaaagggcttagccacatgccaagtgacgccgaaatcatcagataagtagaggcagtatgtgccgtgcgcacagacaaacccgtcattccgcccggcaacggcccatacggaggcgctggtcggaaaccgggacgccgtccaagtctttccctgatcggctgatctgaggacggcgcctttttctccagccgcgaatatgtagggccctatgtaagtcagcacatgaattctgcttttcacttggaacagtcttttccagccttcttccgccgaaaaatgaaaaataccttcgcctttcacagcgacaaaaaatcccgaagatactgatgccatgacagccgtcgcgcctttatgaaacatggcacttgtctccgtggtgagcggcccatgcaagaaaaccgcggacaaattctttgcagcattcctgatcctcagccgtctcgggcgccagctcaattttcagcgtttccggatataaattggctccggcctgttcaaacgcatcgcaaaacagcgtgaccgcttcgcaaaacttcgggtaggcgtgatcgcctgaaccgaaacaggccgttttcagtccgttgagctggctgtgcaggatatcttcgtaaaaatcttccgcttcgtaaggaagatcaccgtccccccatgtgtacgtgccgacaaaaacataatcatacgcttcgagagaatccgcatctgcctcgtccatgtcgagacagtcaaccgctatctgatgcccgctcagtgtttcttttataatgccggcaatatcctctgtattccccgacatgcttgcgtatatcattaatgctttctgcatatgatcacctcgtaattgataatgattttcattaacatatataacactttaaatgataatgattttcattgtcaataaaaaataaaaaaagacagcatgattgctgtctttctaaaatgggcgttcctgcttcagcatatctttaatgacagaaacaaaagcctgcacttgttttaattcaaatgccggctcatatccgagcagccatgtgtcacggccgatcggatgatcctttgtatcaagcaggggcattttatttactttatcttcctcttccaaggtgactgacggcagaatggcataaccgatcccgtgcagcgccatctgcttgcacgtttcaatctgatcgacgaggatggtctgtttcggcgaggttttgaatttttgatgccaccaatgctgaatttcctgaaaatatgtactgtcacttttgaattggataaacggccgatcggtatgggctatatcatcaatacaggaaatttccgtatcaaccaaatataaatgatcggtcattaaataatctttccggcctttccattcaggatttccccggataatgccgatatgtacctgatcttcatacagacttttcagcatttcgctgctccaccctgtaatgagagagacctttgcattcggatatcgttccacatatgtttttaacactttcggaagccagtgctgcccgataatggaggcgacggcaagctttaatgtgccgtgaatctcaccctcaagttcatcaatgttttctctgattctttcttgccgatccgtgacgtcatttgcaaattgtatgattttttctcctgccggcgttaccgtaagtcctttttgagatcttagaaagatctttgttccccaggctttttcaatggtctgcaatcgctgggacagagccggctgtgacacgaataaccgttcggcagccttcctcatgtttaattcctcagctaaaactacgagcatatgaagctcttgaagctgcatgtcgtcctccttttcaatgcctttcgtatttcttatctaccattctaataaaataaaggctgccgaggcaagcgccactcatatgtatgcgttttctttttccggcatgcaaaagaacaaataggctgatcgtgcgagcctacttattcaatgatctgatatgactgctcaactgttttaacacgactcttctcgtgaaaatgccttcaaagacgccttcatcattttcaacgcagacaaagccgttgttaatgaccatgctgaaccctttgataatcggatcattgatgtggagacggggaatgtctttcagcatgacttcctcaaccgtaatttggtccagcttctcaaactcgatccgttcaagtccgaaaatgctgttcataatcatatttgtcccgatcaaaccgtgcagacggtacgaagcgtcgaggacgggaatggcggtatagccggttttcgtcagcactaatagagcatgttcaaggttgtttccgacttgaacgtgcgccactttatccgcctcgatcataaattgtccgactgttgcatcaagaagctgatctgattgtaagctaatcatgtcacttcgacccctttacatttttcatcaaagcatgtattccctatattgcaataatataaacattatcattttttgtcgaaaagtttccgtcaataaaaaagatactctttgcaatcgagtatcaatttataggccgctgattaattttcgttccgaaaacggtcatagagcgttacgagttttttataagtggttccatcaacgctttttgaccctgcttctatatcattgatttcgctggtcaaaagctcaatggcatattcttgattgatcaggatattcagcagaagtttctgttcttcttccgtaaatcgttcactgataagactcatacgtaatcaggccccctatttttaactgaatacctctgaaagcaatgtgaaatttgctttcagctctaccgctagaataagtaaacagaaaaaaatcgtcaaccgcataattcgacattttgcggattctgtatgaaatattattttgtgtaacgattggcataactgaatgctgtgcaggaatcgggcttgattttcgcttcaatgcccatcgaggtaatgcggccggtcatttcttgtatcaattcttttgtcagtcctttttgaccgatatccagatgcacttcaaatgaaagatccgccccttcatccgtaaaaggcaagagcaaatctgtcagttccataagacggccgtcgaggatatgcgcagccatctcctggctgaatgcggtttccagcgaaattttttcgcgaaggctatgtatcggtcttgcaagatcatgatttttcaaacagccccaagctcccttgcctgtacggtgcaagtgtatagccgtaataaactttgtgaagtcgcggtaaacttgtgaatcagtccctacagacagcacgtatgctgaacgggggtctttattgacaaagcgtttcagccgctccgtcacgtcttgaaaggtcatctgtgcctcagaaagattataaaacagaaaagaatcagccatgtacggacactcctctttccagagtctacaaccaaacgaacaagcacgttcctttgcataatttaataaagctccgcttgcggaagaccggaagcttggtcagcctgaaaaatcaaatcaaattactgaaggagctcaaaaatttcaatagaaatcatgtcaatgttatcaaacggatatgtgttaggtttttcacctttttggaaaaccgtcagttcaaacgtttgatttttttcgaaatatttaacactgcaaattttttcgccgttaacttcaaaataacgctgcatcggctcgttagccgcttccgctgtttcttgcagactttgcagccgcgtgatgatacccattaattgtgacattctaaaaaaagactcctttcaaaaaacaacttcaaatcaacaagtatttattataatacaagttctacagagcatcataccataaagtagaccgggatggcattttcccgctggattttcaaaaagaaataaacgggaaaaccgtgttttcgaatagtttgaagcttttttcggaatgtcatacacctttcaaaaataatttttcgctttttgagccgccattatcagatgtatgtaaggagaagcccttttatgaggagacagcataaaaaaacttggcgggggtagcgccaagttttttcggatcttgatctgatagaggggttggggaacagagagtaacttctctctataactaaatgataatgattatcagtatcattgtcaatcgttttttaaaacttttttcaaatgaacaaaaaaagcggcatacagcagccgctttaaagtaacccgtcctgttcatataaataagagtaaggcagatcgataaataaatacatattgtcatccatcgggtatgaaaaggttctgatcatctcacctgtctcaatatcactgtacaggtcactgaaaaagccttttcttgaattccgcatcttcatgatgttttctaaaaagtacggacgccagctccagtttttctccatgtattcaggctgataaagccattcgccggactgcttgaacacatttcccgtcagctgatagccttcttcatcacacatataaattctgaaacagcagtccgtcaggttttccgccagttttttaataaactcatcgtccgcctgatgggttttcttcagctcggaaactgcctgattgacccgcttataaaaattctcagagtgttcatataccgtttccagcttctttttttctctcgtgataaattgctgaaactccgttttcaagcgtgcttttaacaggctccggtctataaaatccccgctcggcgcctgcagataatagccttgaaaaaatcggcctccgtttctccatgcgtactggagctggaaatcagcttctatatcttcatacagcagcgcggcgccgatttttctcgccagcaatgaaatgctgtacagcacatgctcatatgatggtgacggctgagataccttcagcgcctgcaaatctattttcagaaggtccggtgaaaggagcgcgattctgtccaggttgctgctctccttacctatattgtccaccgcgattttaatgccgtatgtacgatagtaggcaagcatatggtacagttgttcaatgtcgccttcgaaattgtgctcggtgatctcaagcacaatacggttcaattcaatgccctgctcttcgtattctttcaaaagctcaagaaagctttcgccgtggtcaagcatcaatacattcgcatcctgattgataaaaatcaacagatcacggtcagcttttttaaaccgctccagcgcctgcctgatgactctgtcatcgacctcaagcttatattcttccggaatgccggaatctaagaaaaacggcccgaggctctcaatctccgcatctgccaaaatccgcccaagcacttcgtagcctacgactctttgttcctcagcgttaaaaatcgcttggtaatacggaatgacatcatcaatattcgtcagtatatcaagtgggtccaacatgttatcacctgcttctctatctttgtctgattatacacaattatatcagcaccacaaatgtttagattaggggaaaaggaggcagtatggccgcagcttagtataaaagggggacatttttaagatcactcttcagaccggttaattaaggacgttattcatttgtttcacaatcacaaataaaaggataaatataagagcattataaccggcagctgtccaaaaataatggctccaatcagttctgttatatatccaatcatccacatgttccaactgaaagaaagttccttttttatctaaagtgccaaatgcaagagttgttaacccgccaacactctcggaaacgtcaactccatacattgaacccgcatgatcagtatgatgtattggcatatacgtataatcagataaaattgtttccgccagcttggctggcagagacacatataatacagccgatgtatcgcctccgagcccactcaaatactccctggctttaataaatttcgtttcatcaggaaaatcgatgtgatatagcttttcaaatctgattatttcatcagatgtaagattggtattttgataatactccggagtaaaagcacaaataataaagtaccaaatattaaagatgataacgaaactgcttacaaatagtacaacgaaccattttaataatttcttcaattaatcgccccttaatctttcaaaattatatcataattttgaatagaaaataaaacaagcgaacggcggctttaacgttcgcttgttttgcaaaataatcaatatatgaaaaattaaaacggataaggattcagccattgccccccgtccattgtgatacaatccccgtttatgtaggacgcttcatcagatagcaaaaacgctgccaacgcggcgatttcttccggtgtgcccagccggccgagcggcacactgttcatagtgcgggacaccgctttttccgattcaaacagcttctccgcaccgcctgtccgttcaatcgggcctggggctatcgcgtttgtgcggatgccgtatttgctcccccattcaacggccagcgttcttgtcagtgacaatacccccgctttagctgcagcggaatgaacgacacccgctcccgctccccatgcgtatgtagcggccatatttaagatgacgcccttctgctcctgctcgatccaatgccttgccgctgcttggctgcagaaaaatgtgccgtttaaaacaatctcaataacagctttccatccattgggtgtcagcttctctgccgggcaaataaagttgccggccgcattgttaatcagcgcatcaagccggccaaagacttttttcgcttctgaaatcatgtctgaagcggcggaatcagaacggacatccatttgaaaacaggcgacctgcccctcaaaggtttcaatttctttttttgtttcctcaagtgcttcatggttcctccctgtcaccatgacgtgccatcctaattcagcctgttttttcgccattgcttttcccatgccgcttgaaccgcctgtaatgattaccgctttcttatccataacaaacccaccccttattattgaatgaataatcattcataattttatcatagatgtctttccgcgtcattacatgctgagaagggatttttcagccaagctgatgatataatagaacaactctgacaaaggttggttttacatatggagaaaatgaccagaagaacatttttaaaaagaggattcggcattttgggtgcagctctcgcaatggcttgcggaggttacggctatgcccggtatattgaaccgcgcatgattgagatcacccgtcatacaatcaccagccgcctgatcccccgcggctttgacaattttaaaatcgttcaattcagcgatacgcatctcagtgatgtgtttacatccggtgacttgaataaagcagcggaaaagatcaatcagctgaaacccgatctgctcatctttacgggagatttaattgataagccgcatttatttaatgatcaccagcgtgcactcgccgtgctgcaaaatcttgaagctcccttcggcaaactttgtgtttacggaaaccatgaccacggaggctacggtacgaacacgtacaaggctctgatggaagcggctgattttcaagtgtttcgaaacggctatcgtcaggtgcagctgacagacggaagccggattgaactcgggtttttggatgatgtaatgctcggaaaacccgattatgaaggcaccctgtcacgcctttccgaagatgcgttttccattttaatcgtccacgagcctgatgccgctctcaagataggcggatatcccgtaaacctccagctgtcgggacacactcacggcggccaggtccagctcccgtttttcggccctctcattacgcctccttacggaaaaacgtataccgacggcatgtatacgctgcatgacacagccgtttacgtcaatcgcgggctcggtacgacaagactgccgtatcgatttttagccagaccggaaatcacgctgttcacattgaaaaccgagcaaaaataagacttttatcctgatgcacagacaccccctccgtaatatgtatatggaaaagagcaaaaaggagggtgatgaaactgctgacatatcaagtgaaacaaggagaaaccatctcaagcattgcgcaagacttcagaataagcactgctgctctccttcaggcaaatccctcaatccaatcggtcatatacgcgggacagcatattatcataccgaatcttcccgacccatccaccattccctactccatcatcgtgtatatcggagcgaagaaactggagttataccgccttggcaggctcatccgtacgtatcccatcgcagtcggaaaaatattgacgaccacgccgaccggagaattttacattgtgaaccgccagcctaagcccggcggcccgttcggcgcttattggctcagcctctctaaaattcattacggcattcacggaacaaataatccttcctccatcggcaaagcggtatcaaaaggatgcatccggatgtacaatcaggacgtcactgaacttgccgctgccgttcctaatggaacaagggtgactattataagatagaaagatcttatttgttaatggaacgagctgatgataatatattacagtgggacctttagggtaaggagcgtgtttatggatatatttaaaaatcgcaattttgtccgtctctttttcgcagcactcgcttctcaaatgggaacgactgtaggtaatatggctttcgctttttacttgctggaccatttttcaaaccagccggcatacacgactttggctgagctgatgtattcactgccgacagttttcgtatttctgattgtcggtgtcgcagctgaccggcttgacagaaaaaaagtcgcagagaattgtgactggatcagagccggactgacgatcgtattgtttgccgcattatacaccgggagcatccctctcgtgttctgtattttgttcatcagaagcgccgtgaccaagttctttttcccggcggaagccagccttgtacaagctattctgcctaaggagcattacgcgaaagcggcgggacttaaccagatcctgttcagcatcttcatggtattcggcgtcggtataggcgcgtttatgtataaaacgatcggtattcacggagccattatccttgattttgtcagctttattgtatcaggctttctgatccgcgcgtgccgcattccgaaagaagcccgtcagccgaacggcccttttaaatggggagattcgtttctgaaagactcggtcgctgattttaaggaagggatcgtatatattgttaaaaacaaattgcttgcttcccttattttcggcttttttatctttggttttgtcaacggcggctttgccgtactgccgatgtttacgatgaaatacggacttgcgcctgatcattacgaatcacatacttccatcttcaccgtcgcactcggcttcggcctgcttgcaggaagtgtgatcggaacgatgatcgcaaaaaaagtcaaaccgcatcatttgatgtcgattcctattttggcagccggactgctcatttttgtcctcggctatacggataagctgtggatttattatgcggcggctttcgtcctcggcatgtgcatcggccctgtcaatatcgccatcggcggctggatgccgaaaatcgttcatccgaaaataatgggccgggtcagcggctggcaggatccttttatgatgtttgcccaatcaattacactcggactggtcgccctgttgtttccgaaattcgttaccaatattgattacctttattacggcatgggaatcgtgattttagcggtatttgtgttctattttatcgctcttccgaaatacagcgccgaggcagcagagatcgatgtgcagcaatcattaaaggctgattctgaaaaacatgcgaaacctgtctaataaaggaaaaagatgcgcccttttcatcagaaaaaggcgtatttttataatcaatatttgcatttcaacgctaaaaaagtataatctatatatgaacttgatcaatgcaaaggagagaaataatggacgaccacgcttattcgaaagagctgcagccaaccatcgagaatctttcaaaagctgtttatactgtgaaccgccatgcaaaaaccgcccccaaccctaaatacctttatctgctgaaaaaacgggcattacaaaagcttgtgaaagaaggcaaagggaaaaaaatagggcttcacttttcaaataatcccaggtttagccaacagcagtcagacgtacttatctctatcggagactactattttcacatgcctccaacaaaagaagacttccagcatcttccgcatttaggtacgttaaatcaatcgtaccgcaatcctaaagcacaaatgtctttgacaaaagcgaaaaacgtattgcaaaaatatgtgggcttaaaggaaaaaccgcttgccgccaaaaggcagcagcccgcttatcataaacccgtatttaaaaaacttggtgagagttatttttaattccgccgcaaaaaagccgatgcgttatgcatcggcttttttctattcaatcacgtacgtatccacttttttaatgagctcgctgatttcaggcttgctgatctgttcatccgctccgactacttcgccccggtggcgcaggtcgtccgtaatcagggacgagaaaatcataatcggcacatcagagctttgcgggttatccttaaggagcttcgtcaaacgatgcccgtccattttcggcatctcaatgtcactgataatcatgtcaatatggtctgacaggtttgctccgttatccgtcagttccacgacgtaatcatacgcttcttttccgttttcaaacgtaacgatttcactgtaccccgcctcagtcagctcatccgtcaaaagacgcatcagaagcggagaatcttcaacgatgatcagttttttacccgcccgtctttcatcaaatccttcctgatggacatgataagtctcaactccggatgccgattcaatatcataaatgatcttttcataatcaggcagaaagatcatcgtctcttccagtttgatgattcccgttaaatgccgctccatcccctggttcaaggaagtcggcttttcaatcgcctcccaggacaccctgtggatttgtgaaacggaaccgacgtgaaagacgattttccgcttgttgaattccgttacgatatatttatcgtcttttgctccttcggcatcaacgccgaaaaaggtatacagactgatgacgggaagaatttcgcctctcagcttaatcatcccttctacgtctttatgagactgaggcacagatgtgacatctaccggctgaatgatttcccggactttcatcacatttatgccaaatgtattgacgcctacttcaaatttgacgatttctaattcgtttgtgcctgaatccaataaaatatcgtattgttgtaaagacaattcaatccctcgctatccgcattcagtattgtactgtatatatcggctggaaacggaaaaagtgaatgtattcggtccaactggccatgaactctttataaaaaaatgcttttttctgatatcccattgactttttgacatcgagtggtaaaatagtcaaggatttttcaggaagaagggtgtaataaatgggtacagtagtcatattcgaccaagatcaaatgacggtgttagaagatatcagcaaaacggcttacctgcaaatgaaaaaagaggcgaaagagcgtcccgacaagcccgctccatacatcttatggcgggaagacgtcagctttgaatacgggtattaatgacattcgccacatatcacaatagatagatcatgatacaatgaagacaatcatttcagctggttgtcttatttttttctgaaagaaggtatgttttcacatatcggacatatactcgggatagttcaataaaaagatgacaaatgctcagctagtggtaaaataggagaaactcaatatatagtataaggtgatgaattatggaacatttgcttaatccgaatgtaaaagaaattgaaatttcaggaattcgcaaattctcaaatcttgtagctcagcacgacaatgtcatttcgcttacgatcggtcagccggatttcttcacgccgcaccatgtcaaagcggctgccaaaaaggcaatcgacgataacgcaacggcatatactccgaatgcgggcggccttgagctgagacaggccgtacagctttatatgaagaaaaaagctgatttgaattatgaagctgaaactgaaatcatcgtcacaaccggggcaagccaagcgattgacgcgtctttgcggacgattttatctccgggcgatgaagttattctccccggaccgatatatccgggctacgaaccgatcatccgcatgtcgggcgccgttccggtccatgtggatacgacgacacacggatttaagctgacggcgcggctcattgaagaatcgctgacaccaaaaacaaaatgcgtcattcttccttatccgtcaaacccgaccggagtgacattgtctgaggaagagctgcaaaacatcgcagccgtcctgaagggcagaaatgtttttgtcctgtctgatgagatttacagcgaattaacctatgacagaccgcattattcgatcgcgtcttatttgagagaccagacgatcgtcatcaacggcctgtcaaaatcacacagcatgacgggctggagaatcggtttcattttcgcaccgaaagaaattgccaagcacatcttaaaagttcaccaatacagtgtgacatgcgcgtcttcaatctctcagaaagcggctcttgaagcggtgacaaacggtgttgatgatgcgcttattatgagagaacagtataaaaagcggcttgactatgtatatgaccgtcttgtttcaatggggcttgacgtcgtaaagccgtcaggcgcattttatatcttcccttccattaagtcattcggaatgtcatcgtttgattttagtatggctcttttagaggatgcaggtgtggctcttgtgcccggcagctcgttttcaaagttgggtgaagggtatgtgaggctgtcattcgcatattcactggatacattgagagaaggcttggaccggctggaagcatttattttaaaaacgagagaatccatgcagactatttaaacaacggcataacgccgttgttttttattgtttcgggaatgtaatatgaaaggccgtgcctctatccggtttgctgtctacttggatagctccctggtggtttttaataaggttgaatgtgaccatcagccccaggccggttcctttttctttcgttgtcagaaacggttcgcctattcgtttcagcacgttttccggtatcccgtcaccctcgtctttcaccgtcacattaacggaatactcatcttctgtcatgatgatgtgaaccgttcccccatccggcatcgactcaacggcatttttaatcagattgataaacacctgtttcagctgattttgatcaccgttaatatacatgctgtcatgttcgtaatccgttttgataaaaatccctttaagatttgcctgcgtctctaaaagagcggtcacttcacttataattttctttaagtttacacgctctttcacggcgttttgctgaggtttggcaagcattaaaagctcacttaaaattaattcgattctgctcaattcagaaaacacaatttcaaagtaatgttcgttttcctccatcgtcggcttcatgagctgtaaaaatcctttgatcgccgtcagcggattgcggatttcgtgagcgatccccgccgccagctgccctgcaatagacagcttttctgatttcagcattaattcctccgtctgcttccgctcagaaatgtcacgcagaatgacctgcacggccgtttctccgaaaaacgtcgtcggaatgcagaccatttccgtgtagatcagccggtttttaaaggtaaaccacgactgcttaatgatttctgactcggtctttcggttgataatattttggatccgctgtttcacgccgtcatgatcgcagggatgaagctgatcatagacgtttttcccgattaaatcttcataggtttcagcctcaaacagcgaaatgcccgattcattcatgaatacccacttatcattgtgaatcacggcgagcgtgtcaattgaattctgaatgaggagctgataacgctctctgcttttttgcagaatcgtttggaattttttccgtgaagaaatatcaatcagaagcagcaattccgcccgctgatttttatatgtcgtcggtgccgccttcacttctaaatgaacgggcgtgccgtcgagccttctccacgtctgttcgatcattccgacttccattcctttttgcatccgcacaattcggtttttcacaatgtcgtgatactcttcttcaataaactcataagagcgcctgccgattacctcgtctttgctttcggctcccagcatggcaagcatcgcgttgttggcgtaggcgattgtgccgttgatgctgacatataaaggattcggcagcatttcgacaagacgctcaaattcaccgtttccagccgcatcttcagactgttgttctgccatttgcttcttttgttcatacatataaggccggcggggcgtcttctcctcaagcaccttgattttgaggatgatttcccgatccgtcccctccatttgcggtgtgacaatttccacacccgcttcaagccatacaatggtatgatcttttttaataagacgaaaggtgcaaggcatcaaatgatgctcattatagaagtaactttcaaccaaaaattgatcttcttcatgcaggaacgttttgagaaatgacccgatcatctcttcctgagaataactgaaatacgatttgcagtttgcagaaatatacataatacgcccgttagacgtcaaaacggcatgaagatcggttttcgattgaaactgtttgacatgctgagtatcctgttccacagaatccctcctttgcattatactcgcactgcaggctggacacggactgatataaaaagaaattccactagattgattcgctaaaaaatgagcattctccttctattcttattgtgaacgtcaattttcctgaatgaaagaaagggcgcacgatatgttcggccgccctttcatttgttattttttattgtatttcttttcaagttctttgtaagcgtcaatggctcccttggcaatgtttttgcttacatgatctttatcatttcgaacagacggaacgacgacgctgaatgccactcttggatgttctgacggataatagccgacaaaggttagattatacgtgtacttcccccaccagtttttgttcgtgccgtaatagtgcgtctccgcggttcccgtttttccggaaacatcagcgccggaaccttggaatgttgaataagccgttccttgaggtgagcttgtgaccaatttcattcctttatgaacctgatcaaaatcgctcggactgttatttactttgttcaaaattttactatctcgctgttcaatcgcttttccaatcttatttttgctgtccggttcatgaatgcttgtgacgatccgcggctggacgcgatacccgccgtttgcgatggctgaaatatattgagccatttgaagcggcgtatacgtatcaaactgtccgatcgcaaagtcaagcagcaatcccccgaccatttgcggatttgactgcatgcccgctgattcctggggaagatcaatcccggtcttcacacccaggccgaattgggcgtagtagttgcgcattttcttaatatcgtctaatccggcaggcagcgtgccgtgcgggacgtaggtaatgccggcgatatgcatggccacatgaaacatatatacgtttgaacttctttgcagcgcggtcagctcagtaatggctcccatttgtgtccacgattgttttctcgttttgcctttaaatacaagcggtgcatcgacaaacgttttataatgcgggaggccgctttggtaacccgcgagaacagtcgctcctttaacagcagagcccatctcatattgggtcgtaaatgatccgatcgcaaaatcctgtattttatttgtttcgagatcgatgcgtttccccgccattgagaggatatccccgttgttcgggtccatcatgacggcaaatcctctgtcaaccatatagttgcctgcggcgcggcttcttctcagctctttttcaatgactttttcaactttcgactgcaattccatatcgagcgagagctgcagatcgtagcctctgctgccttcatcgacgggcttttggctgacgacttcacctttgctgttttccacatactctactttttctttatgtgcgtttaaatagtcttcatactgatattcaatgtagctttttcccacccggtcattcagtgagtatcctcttgtaacataataatctttccgttcgcccaacaatccctgttccggtgtcgtcacaccgccgaacagagagtacagtgttttgtcgtacggatatttccgcgtccagtcattaattacgtcaatgccggggagctctttcaggtgctcggatacgacagaaacttcttcatatgtcaggtcgcttttcggtttctgtttgttgttttcatgttcgtcaagcagtgacccgctgtttccgtttccgttcagcttattcgggtccattgatttgacgacttgcggctgataggcgttgccgcttgaaaaacgcgtataaatcgccgcgatttccagctcttttttattttgtttgatcgcatcaatctcctgctttgggacgcgttcaatctggcgtttgtacacttcttgcggcttcaggctgttttctgaatccttcataagcttttccgccttcttcggatgtgcggcaagccagtaatcaatgatatttcgatccttcataaattcagtatcaatatgaatcagtgcggcgagattttttgccgttttcaatttgtcctttgccgaggtttttgaggtggatacatatacaatttcaggcacagcctggttatcaaccgccaccctgttccgcttgtcatacatctttccccgcggtgtcggataataggcggtttttgcatttgccttctccgcatcctggcggtgtttatccccttcgacaatctggacgatgccgagtttaaaaatcagtgccgtaaagagaagaaaaacaatcaaaaaatagagattcattctcagcgctctgtaacgtttcgtttttttctttggttcgcgcgcaacttcagccactttctgttacacctctcaaatcattgaatatatttacataaacagattttaattgtaacatttttgtaaaagttgttacagcgaaaacgggtaaaaaaaactgtcaagatcaaattatcttaaaatatatctaacacttcaaataatttgaagagatgtaacggattttaaaaaataaatacagatcgtttttcccggtatagagccatttttctgcgctcaattacaattatgacaagagtttgttgtcaaaggaaatggctggctgcattatgacaaaaaagctgtgataagatttttcatgtagaaaaaacttctctgggaggctattaactatgaaaaaagcatttctcttatctgccgccgcggcagtcagtttgattacattcggaggcattcagcaggcatctgccaaagagctgtcatgccagcacgtcgttaccgtgaaaaaaggaaacactgtacagcatctgactcttcaagaggctgttgaaaaactacatatgaaaacgagcgtgaaaaagctgaacgttaaaaatgagaaagaactgactcagctgctgcaaaaacacgcaaagcattctgatatgacagttaaagacgttcaaaaagaaacaccggcaaaaacggccccggcagctgccgaaaaaccgaaagccgatcaaaaccagacggctgacaatgcaaagcagacagataacacaaacaacagcagcgagaaaactccttcatcagtcagtgcgtatgaaaagaaagtcgttgaattgacaaatgcagagagacaaaagcaaggcttaaaacctctgcagattgatgaaaaattaagcaaatcagctcacgcaaaatcacaagatatgaaagacaaaaactatttcgatcaccaaagtcctacttacggctcacctttcgatatgatgaagtctttcggaatcacttataaaaccgccggtgaaaatatcgccaaaggacagccgactcctgaagctgtcgttaaagcttggatgaacagtgaaggacacagaaagaacatcatgaatcctgagttcactcaaatcggtgtcggttatgtagaatcaggcaacatctggacacagcaattcatcggaaaataaataataaaaaagattgcccctgcgggcaatcttttttttatttcacccaaagcttataaatactttgagttccgctgttttcttcaccttgcgcggaaagcttgtcgtacaatgatttggcaagcgccaatccgggcatttcttctcccatcagctccgcttcttcaagggcaatgcccatgtctttaataaagtgtttcacgtaaaatccgggcgcaaaatcgcctttcagcatacggggagcgaggtttgacaatgaccagctgccagccgctccggttgtaatgcttttcagcacttgttccgggttcagaccggatttttccgcgtaagccatcgcttcagccactccgaccatccccgctgcaatcgcgatctgattacacattttcgtatgctggccgctgccggccggcccttgatactgaatgttttcccccataacagagaaaagcggcaggcatgcttcaaacgcttctttttctcctccggccataatggcaagcgttccgttcctcgcgccgatgtctccgccggaaacgggtgcatccagggcgtgaatggatttttctttggctttctccgctattttcttcgccagagacggttttgatgtcgtcatgtcaatgacaaacgccccttcttttgcatgacggagaatgccgctttcaccgagatagatttcctcgacatcactcggatagccgaccatggtaataatgatgtcagctttctctgaaaggtctttgaccgtctcctgccagaccgctcccttattcagaatctcttccgctttttgtttcgtccgcgtgtagactaaaacaggatagcccgcttctaaaatgtgcgatgccatactgtttcccatgacgcccaaaccgataaatccgaccgttttgttcactgcgctttcctcccctgatgcgatacatatatcactctttcatgtctatattaccatattataggctgatagagtccgcgttacaaggtgaatttagaaatggcgctgatcagatcttcgctcgcgctctttaacatatcagtcgattgctttactttttcaagcgtaacgagctgttcatcagtagaagcattcacttcttccgccgctgccgcagattcttgagaaatggcggagatgctttgaatcgcttcttgaatcgcggcttgttcttcactcattttttgaatgtcattgtaaatatgatctataccttgaacgagagactgcatttccgtcgtaatcagattgaggacctcacccgtttcatgaatggcgctgttttgttcatcattcattctgcttgcctcaatcatcgcgtgtgacgcttcttttgtctcagattgaatcagacggaccgtctcactgatatggccggaagaaagagctgattgttcagcaagcttgcggacttcttccgcgacgacggcaaagccccggccgctttctcccgctcttgcggcttcaatgctcgcattcagcgccaagaggttcgtctggtctgaaattgcggatattgccgtcacgacttcttctatgtttttcgtttgttcttccaggtcattcagcattgcctctacttttttcgtttctgaattggcttcgtttgacttcatcagcagctgcccgagcgcgtccaatcctttgtagctggcatcctctgaagattttgagagttgttttatgctgcctgcgcgatctgcgattccttttattttgactgagagattttctgatttttcgttgatcgtctcaacctctgacgcttgctctgtcgctccggcggcgacttcctctatcgcttttgcgatttgtccgctcgtttcatttgtttcttgtgaaatgacggttagctgctcagatgtatcagacacattttctgaggaggccttgacctgttcgaccatctctttcatattttcaaccatttggttaaagtcttttgttaactcgcctacttcatcttttgatttcgtctgagcgcggacggttaaatctcccgctgagactgaatttgttttggcaatcagctgctgaatcggcccggttatcgtttttgcgaggaaataactgaggccgatcgtaatcacaagagcaatcagtgacataaaaatgctcaccgtgttcattttatcggctactcccatcagctgatctttttcaaactgcgttccgactttccaccctgtttcttttaccgtttggtagacgaccatgttcccctgcagctctttgatgccttctttatccgcagtgaggtcttttaacgtctgatcttccgaaatattttttccctgtttttccggatgcgccagaagagagccgttttcatccgccaaaaacgcaaatcctttatacggtaccttttgctcgttgaccatgctctgaatggaggacagcttcagatctaagctcgccactccgacgacggttccgctgttttgaatggcttttgacgccgtcacgatcatgtctcccgtcactgcatctttgtaagggtcagtccagacaaccttatcgggtttttcggccgccatcttataccacgttcgatttgtcggatcatagtctttggcaaagtcggcctttggatatgtaaacatttgtttgtttgcggttccgacatacgcaagcgcgacatatttgtcattctgtccgatctgttttaactcatcattaaaaagccgcgcggtttctttgttcccatctgataaaaaagaccgggacaattcaccgcctgctaatctcattaatacggtctcatcatttttcagctgaagctcaatgttctgaccgagtgaattggtgacattctctgtcgtacgttttgcttcctccgtcatcatcggctttaatgtcaaatatgaagaaaccgttaaaaaaacaaccgttacgataagcattgccgatacaaacacagcaattttgatgtgcatttttttaaacataaccatcccctcctgagagttatatcggtctttcggccaagaaaatgaataaatcttgaaataaatatcaaacatttccgtcatttggcgcagcaaaaaaagagccgtcgtaccgacagctccgccttacgtaaaatattcgattttcgctttcgggaaataggtttcgatataagattccagtgtttcccttaaagcatgctcttcgtctttttggtatatatacttgccgattccgtagcgaccccatttgtatctgcgcttttcttcatcaagctcaagctttgttttcggatagttcttctcaatcacccgtttggccggttttgtaaaacggtgctggatcagttcaaatgtgatgtcatgccgaacgtcttcatcaagcgccgcatccagtttctcaaacagttccttatagccttcctcccagccatcgtgaatataaatcggcgccacgatgaaaccgagcggatagcccgctttagcgactttgacggcggcttctatccgtttgtcgagcggagaagttcccggttcaaagtttttaatgacataatccgcattgatgctgaatctgaacctagtctttccgttatgttttgcatcaagcaaatgatcgacgtggtgaaatttagtcacgaatctgagctgtcccaattcgctttgtccgaaatgttcaatggctctttttaatgtatgtgtcagatgatcgattcctacgatatcagacgtacaagaggcttcaaatcttgtaaattccggcgcccgttctttcatatactcatcagcctgatccagaatctcttccacattgacatatgtccgaatgtagggctttgaccccatcgtcgtctgcaggtagcaatagtggcaatgccccatacagcccgtcgcaaatggaatggcatattcggcggacggctttgaagaatcgaatttcagtgttttccggacgccgattaccaatgttgatttcgcgttccggtattgctgcaagtgattttttcccggaatattccggacttgattatgcgatgtcgtttctctgatctcaagccccatgttttcaaacttattcttcagctcttgtcctaacgggtattcgagcgctctcggttcaatataaacaagctggggcacaaacggcttcaacatagacagacactccctttacatattctcatgttgttactttccgtttaaaagagagtgaatatgcgttgtaaacatttcctttgatcaatgataccggtcttcttcaaaaagctcgctgtaaagcgcttccgcttcctcatatgtcgaaaagaccgcgtcatcttcggccagcggatgataggtttcgtataaaaacagagacagttctccctcatgatacgggtgatggacgatctccgcctctttaatatgggcaacattggccgcatgcggattgcggtaaatcacatagaccgtatcccccgctgcaaatgattttgtcataataatccctcctgttgaaagttattgttccccccttttttccgaatatgaaaaaaaccagacggcttacaccgtctggcttttgtattacttattgaatgtttctttaacgaatgcgacaacctcttctgtcgtgctcatagacaagattgtttctttgaatgattcagcttcttttttagaaagcttgctgatctgcgttcttgccggaaggatggatgtagcgctcatcgagaactcatctaagcctaagccgagaagaatcggaatcgcaatttcgtctcccgccatttctccgcacatgccgacccatttgccctctttgtgagcggcttcaataacaagggtgatcagacggagaatcgccggattgtatggctgatacagataagctacgcgctcgttcatgcggtcagcagccatcgtgtattggatcaagtcatttgttccgatactgaagaagtcaacttctgcggcaaactgatctgcgatcacggctgtagacggaatctctaccatcataccgacttcaatatcgtcagaaaccgctacaccggcttcgacgagtttttctttttcttcgagaagaatcgctttcgcctgtttaaactcgtttactgtcgcaatcatcgggaacatgatttttaagtttccgtatgtacttgcacgaagcagcgcacgaagctgagttctgaagatttcttgctcttcaaggcaaaggcggatggctctgtagcctaagaacgggttcatttctttaggtagctgcaggtaaggaagctctttgtcgccgccgatatccaatgtccgcacgacaactgattttccttccatacgctcaagaaccgttttataagcgtcaaactgctcgtcttccgtcggaagctggtcgcgtcccatgtaaaggaattccgtacggtaaagccctacagcttctcctccgttttcaagaacgccttttacatcgtcaggtgtgccgatatttgcggcaagctctacatgatggccgtctttagaaacagtcggttcattgacgagcttcgcccactcagctttttgcgccaggtaagcactgtgcttttcttcatatttctttaacgtttcactggaaggatcgatgatcacatcaccatcgatgccgtctacgattaccgtaacaccgttttcaattgtccctgtagccgcttttgtgccgacaacagccggaatttcaagcgaacgggccatgatcgcggagtgtgaagtgcgtccgccgatatcagttgtaaaaccttttacaaactggcggtttaattgcgccgtatcagacggtgtcaaatcttcagccacgataacaacctcttctgagatcatgctcgggttcggaatttccacgcccagcaggtgccccgtcacacgttttgttacgtcacggatatccgccgcacgctctttcatgtattcgttatccattgattcaaacatagtaacgaacatggaagctgtttctttcaaagcgaattcagcattgactgaatctgtgctgattttctcctttaccgggttcaacagctcaggatcactcagaactaaaaggtgcgcggagaaaatgtcagctttgtcttgtcccagttcttttaaagcatgctctttaattttttcaagctcttctttagaacgtacaatcgcttcatcaaaacggcttacttcagccgcagcatcagcaatgtttttcttttcaaccgttaagtccggctcttcaagccggtatgctttcgcaatcgcaattccggctgaagcgcctattccttttaattcttgcattactcgccgagtccttcgcttttcattgtttcttctaaagcgttaagagcatcgttttcgtcagcgcctgaagcggaaattgtgatttcagcgcctttagcgatacctagagacataacgcccatgattgacttaaggtttactgttttgccgttatattctaagtttacgtcagcatcgtatttgcttgcagtctgtacaagaactgtcgcaggacgagcgtggattccggaatctgctgttactttaaatgttttttgtgccatgattatcattctcctttaaattaaagctattttactacacaatattatatcatacagccgtacttgtcatctgacaagcacggcgtatttatatgcttattttccgattttcacaatatctttttgttcccgttttacggtaccttcggccgaaagggaaatcgcttcaccctcggcaagatttgtaaagacaatcggtgtcattaatgaaggaacatgaggtttaaccgcttcaagatcaacttcaagcagcttttgccccggttcaacccggtcaccctcagaaacaaaagaagtgaatccttcgcctttcagactgactgtgtcgattccgaaatgaatcaggatctctcttccgccgtcagactgaaggccgatcgcatgttttgtcgggaaaacattcagcacttttccgcggacaggcgatacgacgattccttcttcaggaagaatcgcaaaaccgtcacccatcatttttcctgagaacacctggtcaggcacatcggtaatcggatggatttcgccggtgatcggagaagcgaacacttcttcaccctgctcgtttcggagcggatctgcgataacctcttcaacctgctggctgacttcttcttgcgcggatactttcggttcagggcgcggcgtgcgtccggcgataatatcctgcatctgtgtttttaaaccgtcagaacgcgggccgaaaatggcctgaatgttgtttccgacttcaagaacgcctgaggcgccaagctgtttcagacgggccttatccactttcttctggtcgttgaccgtaacgcgaagtctcgtgatacaagcgtcaaggtgcttaatgttttcctgatcacccattgcctgcaggatttcataaggaaggtcgccggcttcgcctgaggcgcccgcaccttcatccgcagcctcttcttcacggcccggcgttttcagattgaactttctgatcgcaaaccggaaaccgaagtagtaaatgacggctaatcctaagccgaccggaatgacaagccaccaagccgtccggttaggcagaattccgaacaggaagtagtcaatcagaccgcctgagaaggtcataccgatttttacatgcagcagctgcataaccataaaggaaagccccgcgaatacgcagtgaatcgcaaacaggataggagccacaaacaagaatgagaattcaagcggctcggtaattcccgttaagaaacttgtcagagcggcagaacccatgattccggctacaagttttttcttttcaggcttcgcttcatgatagattgcaagcgctgccgccggaagaccgaacatcataaacggatatttccccgtcataaatgttcccgccgtcagctgtacgccgtctttgatctgagccatgaaaatccgctgatctccgcggatgatgtctccggccgcatctttatagctgaaaaattcataccagaacggcgagtagaaaatgtgatgaagaccgaacggaatcaatgaccgctcaatcatcccgaaaataaaggccgccaaggttggattcgcttccacaagacccgtggagaaagaattcagaccgtgctggatcggaggccagatcactaacataataagaccgagaattaatgcggaaattgatgtgataatcgggacgaaccgcttacccgcaaagaatccgaggtactgcggaagttcaattttataaaacttgttgaacaataacgcggccagaaccccgacgataataccgccgaacacgcccgtcgccaaagtgggtatccccagcatgttaatataggccggatggttttccgcaaaaaactttgcccgttcaattttgtcagacggaatactgccgtttgccataagcacggcgctcatggatacgttcatgaccaagtatccgataatagccgcgattccggcaacaccgtctccgttggcaagaccgatcgcaacccctactgcaaaaagaagcggcaggttgtcaaatacgatttggccggcgctttccatgacattcgccacaagctgaacgttatcattgcttaagaagtgcatgacttgaatcatatctttgttctgcatggcattccctaacgcaagcaagatccccgcagccggtaaaatcgcaaccggaagcataagagcacggccgattttctggagaacgccgaataatgctttaaacataaaagatgtacctcctctgttagctagtgtgaccttacagcgaaaattcatgacaacgaattcactggcgcaagtcttcagtttaaccgtttacatttgcccttttacacaacaaaaaaggcatgagtaaaaagggtgtgcaaaataacgggaccgttcttcccgttttttaccctcaatcactcatgcctgatcgaatcagtgacacgtttttaaggtttcaactgaaattatgaaattttattggttaatcggtacaaatgaagcgtgagataaaccgcttccgcctcatgaactggttttttcagtatttgctgcaagatttttatcagtttccaagcagtattgtagcatagcgggtattcatttttcaataataacattaacttttctggttcttttgtctgctcttcccgattaatcctgtctatggtaaatctgatatgccggatcagccgcaaatagtggacgctttctttattcactttcatctggaaagattcctcaatcacctgaacgagccgggacatcagctgtgaatgctgattgacctctgaaaggggccgattcgtcagggcggagtggatatgcagagcgataaagccgatctctccttccggaaggcagattcccgtcttttcattaatcatgccgacgacttcacgggcaatttggaattcttccggataaagcgtttcggtttccatgagaaacgggtttttaatgtcaaaaccctgctgcagccgctttaccgcaaaggcgatatggtcagtcagcgcaatatggatatgctcatttaacggttggcttgtccgcttcttgatatgataaatgacgtcattggagatgtcgacaagtgtctcgtccacataaccgaggagctttttaaattgtttttgttctttttcatcctttaagatgaacatcttgtcataccctttatcttcaatgacatccgcttgtttttttccaaagccgatcccttttccgattaagacgacctcactgtatctatcatgtgttgcgatgagcacattgttatttaataccttttcaactgtaaaggaccccttcatgatcctcagctcctttgtcattcaatacctcatatcgtacaaaacgaacggaaagcgcgtcaattctttttttagacggttgatcgttcaataaggcggtaatcaagaactttccttgccggaggcccgccgctgatccggttctcaagcatgtgaaaagcctgctttcccatttcttttgtttgtatatctattgtggaaatacctaacatcttgctgatatcatgattgtcgatgctcaaaatcgcaagctcttccgggatgggcgtcccgtttgccttggcttcaaggtaaagacctgcggatacttgatcattcgccgcaaacagcgcagtcggtttgtcatcccagctcttccatctatgaaaaagggctttcccgtcaagcagcgtcagcgccttttccacaaccagctcttccctgtaaggctgcccgatcttcttgagcgcctctttgtatgcggcaatgcgtacttgactgttttttcccttttttctggccaggctgatcgctattttccggtgtcccttttctatcagataatccagaccgtgccgaaatgcttcccgatgcggattactgatggaggaaagccctgccgcatcagtgtactggcagaggatgagcggttctttcacggtaagcagatgttcatcaggaattgctttggagcagataatcaggccgtccacttggcgctcctgtaattgtgataaagcaaaacgttctttttgctgctgataatctgtctggtataaagaaagatgcacgcctgacgcttcggcagcctcggcaatacctgcaacaaggtccgcaaaatacggaagattcaccgacggaagcacaacgccgatcatatcggaaaaacctttggataaatgcacagcatgaatgttgcgcgtatatccgagcgattgcatcgcttttttcactctttctcttttgtccttacttacataaggatgatcgtttaatactcttgaaaccgttgtaacggaaaccccggcagcgccggcaatgtctctgatcgtagccatggcgtccccctttcttttttcccttgatctggaatgcgtttcatacagtaagctagaaacagaaacagcctattcgtttgaaaggagaagaacagcgatggggattctttgcttaatcggtttgtgtctcgccatagtcggcggcagttatcttgccatgcggcccctgaatgaaaagcatgacatcaaaccatttcagcattttgatgattttttcatttaaaaggtgataaaaaaggacgctgcgtaccagaaccgtccttttttatcacaaagctttttatttcagaatcgttaattctttcggatactgcgttaatgcttcggcgccgtcttttgtgacgaacacatcgtcttcaatgcgcacgccgccgacatccggcacgtaaatccccggttctatcgtgtataccatgccttctttgaggagtgtgtcgttcgcgctgctcattgatggatattcgtgaaccgaaatcccgagtccgtggccgaggcggtgcgggaaatagtctccgtatccggctttttcaataatgccgcgggcttttaaatcgagatcgccgattctgacgcctggtttgcttaattgaagcgccgcctgttcagctttaagcaccgtttcgtaaatctcttcctgtttcgggctgattgattggtatgcgaatgttctcgtaatgtctgaacagtagccgtcaagaataacgcccagatcaaacagaacgaaatcgccttttttcaaccggtctgcacccggattcccatggggctggcctgatttttccccgaacagcaccatcgttgaaaatgacatgccctgcacgccttttttcttcagctcaaactcaatctgcgcgagtacttcggtttcactcacaccctctttgagcgccgcaacaccgacttcaactccgtaatccgcgagctttgccgcttccctgagaatgctgatttccttctcatctttcacgagacggaattggttgagcgtttcttctgccgaaacaaatgccgcgccccctgaagcttgtttgagctgttctgagcgggaaagagagatcgaatccttttcaaccgcgatggaatcaagccgcatatttcgttttgtgagctcggctttgatcagctcccacggatcttcgtgatcgccgtagccgataatatcatgctcccacccggcgttgcgggcttgtccggcttccattcccggacaaacgaaaaacggctcctgttcctgaaacaggaacaatcccattaaccgctcatgcggatccgtgtaaaaatcagttaaataaaatacgttttcctttgtatgtataaacgccgcatcatgtccttcttttttcagccaagatgaaacacgttctaatctgttcattttttgcttttcctccttaccaaagtgactctttattcattctatcagttttccggcgtttatgctgtgaacgaacatttaaaaaacagccgcccgatgtgcggctgtcatgtttattttaataatctcagtccgttcagaatgaccagaatcgtgctcccctcatgcccgatcacgccaaagggcagttccatcacctgcagaaagttagcgcagatcaaaaggcagatgaccgagagcgagaaaacaatattctgcttaataatccggttcattttccttgagagtctgcacattttcacaagcttgtgaagatcatttttcataaggactaagtcagccgtttcaagggccacgtccgtccccccgcccatcgcaataccgacgtcagcggttttcagagcgggcgcgtcattaatgccgtcccccaccatggcgattgtgccgtacgtttctttcagcttcttcacttcttttgccttttggtccggcagacaatcggcaacaaccgtcgtcatgcccgcctcttttgcaatggcagccgcagtttcagactgatcgccggtgagcatggctgttttaatgcccagtgattcaagctcagccatcacggctttggcttcaggtcggatttgatcctttaaggcgaagcagcccgcaatccggtcatcttttttaacaaagaccagtgtaaaacctttatcctttaattcttttcccgatgtttgcaaaaaagcatctgccgcatcttcacctgcaaaccccgcttttccgaccatccatttgacgccttctatttcagcctgaacaccgaatccggacgtctcgtcaatcgatagatgtcctgcgggcgcggcgccccggctttcggcaaattcagctatcgcttttgcaagcgggtggcttgattgcttttccatcgcatacaccgcctgcatgatctcatcttcactcacatgttccgcagcttgaaatgccgcgactgccggctgtcccttagtgaccgtgccggttttgtcaaatgcgatcatccgtacgcttcccagctgctctaaaaacacacttcctttaaccaataatccgttgcgggccccatttgagataagggaaagcgcagcgggcataatagaagcgacaagcgcgcacggggaggcgaccaccataaacaccatcgcccggtaaaaggtttcactccagctccagcctaaagcgaaatgaggaatgaataaaagcaaagccacggctaacagcacgcctttgacatagacactttcgaaccgctcaataaatgcctgagccggtgacacgctgttttgggctgattccaccagccggatgatttttctgaataaagactgttcatttgttttcgtcacacggaccgttaaggagccgtttccgtttaccgtccctgtaaacacagaatctccggctgttttttccgccggcatcgcttcacccgtaagcgccgattcatcgaggctcgtcacgccagactcaatgatcccgtctgctgctacgcgttcgcccggcttaatgacgatcatgtcaccgatcttaagttcagcagccggcacccgcttttcccgtccctccgcaagcagtgtcgcttcctccggttccagtttcattaaagatgttaaatcacggctgcttttattcatcgtatatgtttcgagcgcgccgcttaacgaaaaaataaagataagaacagcgccttcagcccaataaccgatcagggcggagccgacagccgcaaaaatcatcagcagttccacatttaacgccttcgtctcaatggtatcctcaattccctctttcgcttttgcaaatcccccgatcaggaaggcaaggatatacaaagtgacggacaggccttttgtttcggtaaaaaaccaggccgcaagaataaggacgccggatacgagcgccgcaatgagttctgcatgctggagccacttttttcccgcccgctcttcttgtatgtgctgttgtgaatgggtttgtgtcatcacttgttcattcattatgaattctcctctctaattgagaacgcaaatcatcttcaattccccgataaaagcaaaacagccgcctgacaggcagcattttcacagtgttatcgcagtgttttctttattatagcatgccggcggaagatttcaattataattgttttaatttctttttgataataattatcattagcgtttcttcagctgttcattatatgcaaaaaaggtgctggaggaattcctccagcacctttttatttctctgaccattcttttaattgtgaggcggtcatcggaccgacgatctttttttcgatttctcctttttcattcagcagaaatgacgtgggaatcgtcatgacatcgtattccttcataagctcgcctttcgtgtcaagaacaatcgggaaagtgagatggtgctgactgacaaagttttgaacggtatttttgtttcgctcggcattcatcaaatttaccgttacaaggcttacatcatcggactgatgctgttcataatacgtttggaactgaggcagttcttttttgcacggcggacaccacgatgtccaaaaatgcaaaatcgttttctgccctttattcggaatcgatatctcgtctccttcaatcgtcttcatcagaaacacggcgggaactgcctgtttttctgatgaggcttttgcttcaggcatccagacggcggcagctatcaaaaggactgcacatacaattaggcggtttttatgcatatgatcttcctttcacgcgtttcggatagcttgcccttccttattgaaatgtatcagccttttcagctttcgatccggggcgctgttcttccgccgcccgtcaaaaacacggagacaccgaggtctttgcagatcgtcgcgtaatgtaaacttgtcagaagaatcatgccggtattcatgccgagtataatgccgagcatttgcaattccggcatagaaccgagcacatacatcatcgaaagccctacaatgctgctccatacgttatgataaaacgccgttttcacgtggccgataccgatcagacaggcctgaagcggcatcacaaacagatgaaaaagaaaaaacggccacaaaagctgcaaataatactgcgcttccggagactgaaaaaacaaatgggtcagcgggcccgcgaactgaaacatgacccagactgccggaatgccgtagccgaatgtaataaaaatcgcttgtctcagccgtttcagcacaatatcatattgggacagcgcatacgcttctgaaatgctgggaatcatgacgaccatcagcgaatgggcgataaatgcgggaaacgaaccgattgtcatcgcaacaccggcaagcatgccgtattgatcaatcgcggctgtcccggctgccccggacgccagcagcgctcctttcactaaaaagggttcaatggcattcgtcaccgcatgaaatatacgaagtcccgttgtcgggatcgatacggccaggaggcgtttccgcacgtccttgccgcgaagatgaatgtgctgatggccggaaagcgccctcctcgccaaaataaactgcgtatacaagtaaacgaacaccacgacatcgcttgcgaccagcacaaataatgaaatgagcacggccatatcaatttcaaaagagtaccattgaaaaaagataaacagacaaagcacttgaatgatttttttcatgacattcgcaaccgcgatttttcccatttgctgcacacccataaaataacctctggcgatggatgtaaaagcgacgactggaatcagcccgatgacaatccctttaataaacgggtgatacgtatcgaatacaggaatgaacggcagcgcgatgcttgcggccgcggttgaaaacgcggtaaaaacggcggtcattctgaaggcatgccggagcatgctttcatgcagcttctgattggattccgcgatgaattttgaaatggagatcggaagctccagactggcgatgacgataatcaaaaaaatggtgggcagaatgctcatgtaaagtcccatcccatgctcgccaagctcccgcgccagtatcatattcacgacaaattccagacattccgcgaaaaaggcggcgatggataaaagaatgatccctttcacaaatcgattcatggtgtctctccttgtctctcgttcttccatcatcatatgagacaagttctgaaaatattttcgatttctcaaaattgaaaaaagcatagccgggatattttttatcccgctatgcttacatcgcaaatacgtgtctgccgatccgttcgataatttttcgggaacggatccagtggtcagatgccgttttcggattgtagaaaaacaacgcgtccgtttctcttcccggatggtcaagcgcctcatttgcggcggcgatggaatccttatccggcttttgattaatgcttccgtttgctaccggttcaaatgcattcctttgatagatcacaccccgaatggtatccgggaagccgtttttttcagtacggttcagcactacgctggctaccgcaaccttccctttataagattcacctttcgcttctgcgtgaacgagacgtgacagaagttgtctgtcagcgcgggaatacgtttttttcggcggctgataagccgtctcttccggttttgccttcttctcttggtgagatgacagctttatcggttggatagaatgcttatgatccgtttttgaaagcttcggaaccgagctttttttatttaaatcagcaaccagtgtgctgggttcttgctttggcttcttcgcaaaagtaaacagagcttctgtatgttcaatttttgatgcaggcataaaacatagaaaaaagacagccaaggcagcaaattttgtcgtcatacgatttcctccttaaatacttcactaccttaacaagagctgtgcgcaaattcacggttaaagattttccagtgctcccaatcagcttttatgatggaagaagttcgttaacagccttgttattggcaggaaaacagccgtcattttcacaacattaaccaaatagcagtaaaagtatccatcggagggattttacattttgtttacatctgttacagcaagatgaaatgagaaaccaaaaaacaaaaaaaagactcctcaagtgcgaggagccgtcagcttcttggctgttctaaatactgaaatacaacatctccgccctgctgtgcaataccgcggaaatgcttaaaatcttcctgcttcgataaaactgctcgaaatgcaagaaaatgttctttctgcaccctgaattctttgatttcaccggtgcgcatttggttgatacattctgaaatttcctcaggcagcaacgaacacagcctccttttctcggctttttcccgaaaatcaatataccatctttcccccgccgggacaatgattgagcgggctgatacccatatcgctttacttcttaaagaaaatactgcaaaatattttcaaacaggatttatgataaaggagaggaagctcgtgaaaattgctaaggttggaaacgtcattgaatttaaaaacggattaaccggtattgttgaaaaagtaaatgaaaactccgtcatcgttgatgtaaccatcatggataattatcgtgaccttgaattagattccctcactgtcgtcaaccataagaattataaaatcatcagagactcctattaacccccccgaacaatccgaaccatttacatatcccgcacaaaagctgccgcccggcagctttttcaaatgaattcagatctcggtcatttctacaaaaaaatcatcggtctcatctttattgtaaagattagtgacggatgtatagtagttggttattttaccgcggaattcaagcccacgcttgggtgccttgatgtcaaatgttttttcatacaaaaggacggcaatatcatgatacgtttcagaggtcaccttcaatataaatgaaatcatgcggccgttttcacccgcactttctttacaatcatacattttcagtcttacaccgtttaactctaacggctccataacgaacactccttctttttacaggacatgctatcatgctgaccattcctttacaattgatccgctccgaatgagaaaaaacagcgcaggcctttacaaacgtatgttccctattttataatgaaacagacgagctgccatccagcacccgtcttttcattagaaagcggcgagtggaattccccccggattcgctcgtcttttttatgtaaaaccccctcatttctgaggagaaactatatggtcgattatcaacaagtcatggttctccacgtaccttggcgccttgaatttccccatcttttaatgagagtggtcaatcaattctcatcatgttttttagataaaccagcatccattcaggatagagattcattgcaattatcttcgaattttgctttgaactataaatcattatatatttttaaacactgtattccagactgacgcatcctcttgtccaagactccagctgccaagacctttcagattatatttttgagcgagttttatttttgctctgagtgactgttcattttcaaaccataatgtatatgttcccgaaggcaacagccccttgttatcgtgattgacagtaaaaatagcttttggagattgactctttgtgtcaaaaataattgtcccgttatgcctttttactaatgagtcaacaaggtaaaggggaatggcttgagaggcagattggcctttcatccaacagcggccatagaatggcaatcctaaaactagttttttaggagagattttttgggtcagagcatattgaatggacttttccacccatcctacacttgcagtaggtccagcaaggtggctttcatcgtaggccataatcataaggtaatctgcatatttagctaaatactcgtaatcatatgatccgtgccagccctttgtccagccaaaaggatttgccgccactgcaactgatacttctttatgtctaggaatactttctcttaccaatctaacaaaatctgtaaatgaattccgatctttttctgtaaggttttctatatcgatattaactccgtccaaatccagttcttctattgcatgagaaatttgtttagctaaaagaactcggttcattaatgaaaatcgtcccaaatcctgatcccaatgattgcttagaaaaggaactacttttaattttcttctatgaagagctttaatcacatcgggattagctgaacggagaagtaatgatccatcttttctgatatagaaaaaatcaggagacacaacatttaatactccgttcgtttgatcaacgtgttgaataaaatcccatcctaatccagaatagaaatagctcatttgaaacatctcataaccccttcatccccaaaaatatcaagttccccacaaataaaaaaatgaggattgtcagttcaatttgattcgtttccgaaacctcaaaaattatctttctcttatctttataatttgtccaggataaattctatctgaagaaagcttattaagattcataagttgttgtaccgggatattgaaggatttagaaatcgtccataatgtatcgccggattccacatgatatacttcgtatgttacgggaaattccatataacgaggcgttctttttactttattcgcttgatttcttattttaggtattttccccttcattcatattactctcctttagaaaaatttgttatcaatatttctaaacagtttcgctctaatcttaatgatttgtccagcatatatttgatctgatttgaaatgattaagctccatgagttgctgcaaagaaacattatacttcctggcaattattgataatgtttcaccgggagtaacatgatggatcacgtatttttctttgagaacatctacataatgaatggtttcccctaagtttcttataattcctctgctttttagcacctcaagcattctctcggctctatgccgataggaatcattctttacagcctttttaccgtttatctgaatcttttttctctcgctatcatgattcaaatagtatttaaccttttccaatgtttcttttgaggaggaagaaacgatgagatcgcggccaggtttgaatttacctcgaactgctggtgtatccgatgtcaataaaacccccccggaaccaagaatctcataggtgcgttgcgtaagttggctttcacagttttgcaaaccgataacgacttttgctgaactgtagactttatatgcttcagtataatcaaggtatccatggatccaattgcggggaatttctcttcctatatatttactcattttttcccagtttctcccccaaaaatcaatgcgaatacccttccgtataagaggacgaataagcgtttttaaagaggacgaacggaacacttccggatgttcttcaagaaaattagggtaagcattagccaccactgctatatcacaactgtattttgctaatggtttaatctggtgatgtatactttcgtgaaatgcaaagtctaagtgagctgctttaatccccatgctttcataagttttacacagagaaggcgtaaccgtgaaaacaaaatctggtttcacctttttaattaacgggatagtaaagttttgagtgtgcagcgggtcttcagttgcccaataaacgagagggatattcacctttttagtagcgttgcgaatccaggcctgcttttcccttgaatgctctggtgtccatcccatagatactattagatctggtttaaattcgtctatcatttcagtgatattttcccgacttacaggaccggaaatcattacggtatgtcctgcttccctaaacccatttggtaaaccatagagccacatgggatgactctcgaggaaaagaattttcacacattttcgccctctctttcactttttaatgtctactttattggtatgtagaagagaaataatttgtcgcggtaccagtctataaaaaatgttcaagtgcaagataacgtgattggatatggatgccccacaaaaaaagaaagcaatctacaacatattttcctttgattttgttagcctttctgccaaaatactttcgttaataaattgtttttgtgcttaaaagaaaaagacgtacacatttgtacgtcttacattacctctgcaatagcaatttatttgcataaaagtcataataggcacgcttttatagtgattaacgattatcaatcgtctccggatacatatcatgattcatcatccgttgttcggccatttttcatattttgttcccggtctgccgtagtttgtatacgggtcaatggagattccgcctctaggcgtgaatttgtcccatacttcaatgtaacgggggttcattaattcgatcaaatcattcatgatgatgttcatgcagtcctcgtggaagaaaaggcaggtcaaagtcttgtcccataagtacttgctctagcattaatcatgaagtcacaccaatttcacaccttaccaaacgattgattttaaccttttttggggactatttgtaatctctgcgcagtgaaattatacctgtgctagcccgccatctacgaacaattcaacacccgtcaagtaactgctttcgtctgaagcaaggaaagatacagcgtttgctacttcttcaggtgtcccaacttttccagccggaacagtatttctggcattttccattgctccttcaagtgcatcaccaaaaagctcatcgtatgcaggtgtaagaatagctcctggactcaccacatttacacggatttcagtaccttttaggtcaagaatccagttgcgaaccagtgctcttaatgctgctttagaagctccatatacactaaacgctgggttgccaattgatccagcagtagagcccgttacaataatagaacctactttgtccgggaatagtgataacgctttttgaacagtaaagatggttcctttcacgttaatgtcgaacgttctatcaacctgctcttcagtaatttcacctaatggaaggaagttgccgatgcctgcattagcaaaaagaatgtccaacttacctttttcctgctttatcatgtcatatagtttgtctaagtcttcaagcttagaaatatcaccttgaacaccggttacgttcttgccaatttggttaacagctttatcaagttcgttttgtctgcgtcccgtgatataaacatatgcaccttcgtttacaaatttttgtgctgcagcaagaccaatcccacttgttccacccgttacaagcgctattttaccttcaaatttacccatacttaacactcctttagaattgattttattttatgtctagtacctttaagtacttgaagaacaacttacaagatatagtatccttcagtaagcacattatcggaagtacccacttttttgtgatatagtaactaaaaagtaataaatgcggaatggagagctttagacatgaaaaaatttagctgtgggtttgaagtgacaaaggaagtcattggcggaaaatggaaaggacttgtattatactttttaatgaatgaaccaaagagaacgagtgaattaaagcgcatgatcccaaatataactcagaaaatgctgattcaaacacttagagagcttgaagccagtggacttgtgagcagaaagatgtataatcaagtaccgccgaaggttgaatattcatccactgaacttggagaatctcttaaacctatcttgcaggagctctgtcaatggggaagccattatgcggagcaagagtatgcagaaggtgaatatgaaattgtacaaccagaacaactaaagtgaggattgatgtagctgctgaagtaaatacttcaataccatcacctaacagatgaagaacagtcagaaataaatgagatattcaattttgaaagtgaagttctaataagaagtgtcacggactatattcaggaaaactttgatgaaattcaaaaaagagctgtttcaaatgttaaagagaaggttcagaaacttagccaaaaaataaatgaaaatattgataataatatttaatgcctatgatctttagataggcattttttctttcggataaaaaagaaaagacgtacaaattgtacgccttaatctgcttctgtactatcaattttccactgcataaaagtcacagttcaggttgcacctcaggtcacacttttattgagcttagtgcgggtcacactccgtattacacaacggaataattaccgattatcaatcgtctccgggtacatatcatgattcatcatccgatgttcggccattttttcatattttgttcccggtctgccgtagtttgtatacgggtcaatcgagattccgcctcttggcgtgaatttgccccatacttcgatgtagcgggggtccattaattcgatcaaatcattcatgatgatgttcatgcagtcctcgtggaaatctccgtggttgcggaagctgaaaagatacagcttcagcgatttgctttccaccattttttcgtccggaatatagctgatgtagatggttgcaaaatccggctgtcccgttttcgggcaaagcgacgtaaattccgggcagttgaatttaacgaaataatcacggttcacgtgtttattcggaaatgattccaaaacctccggtgcatattcaaataaatagtttgtcccttgattccccaggagcgtaactccttctaattctgattcttttcttgtcatataaatctccctttctattaaactccccgtttattgccccaaagcaatgtatgcagctgaggcaggactctgacgagattcagatccgaatcggctgaaaccttatcaacgagtgtttcgtattttccaagcagatgtgcgatcaatgcccggtcgtccgtcgtatggacgttatcgtttccgacctgaagataaaacgggatattcggataccgcttgtgcacggttttcgcgaattgcagatcttcatcattaaaaatgacgacctttaaactgaccgcgttaagcctttctgccgcatcaagcgaagacacaatgtgatcgagctttgcaaaatcggttgtcatccccgaacttggcggcttcggtgaaatcgtcaggtcgttaatcattgtgaaccaatcctgatagaccgttccctgtgtttctaaagcggcgcgcaccccgttctctttcagcagcagaatcagcgcgtcaagctgctttaacagcgccgggtttcctcctgagatggtgacatgggaaaaggcgtctccgccgatttctctcagctcgcggtaaatgtcttccgccgtcatccagcggatatcttttttggcagagccgtcccatgtaaaagcggagtcgcaccagctgcaagagtagtcgcagcccgccgtgcggacgaacatggttttctggccgataaccatgccctccccttgtatcgtcggtccgaaaatttctaataccggaattcctttagccattcctatcaccttttttcgggcggtatacgcaatagcttgtcggggtttccctgacaaaaatctgcacgcagaccggctgattctccagtgtttcgaggtaggactgcaccttatcgtaaatcgttttggccacgacctcggtcgtcggcagtgaatatctgtcatcatcagcagaaaactcgtcatggtcattcagcaatgtatggtcataagcgccgtgcaccaatttcttcagcacgctgaaattcacgagaaagcccgaatcgtccagttcatcccccgcaactgtaatatttactgtatacgtgtgcccgtggactctgctgcacgctccggcgctttcgcggggaataaagtgcgcggctgagatgtgcatgtccttattcaactcaaacgaataaggatgctgaacctgcgggtaaatttgagaaagcaattagttccgctctcctttcattttcatatattcatcatatcctttattgcggagcaggcatgccgggcattcgccgcatccgtccgcaatgatgccgttatagcaagtcagtgtgttattctttacaaaatcaagcgcgccgagctcatccgcaagtttccacgtttccgctttgttcagccacataagcggcgtatgaatgacgaacggcttttccatcgccaggttgacggtgacattgcaggatttgacaaactcgtcacggcagtccgggtagccgctgaaatcagtctcgcaaacaccggtgataatgtggcgcgcgccgatttgatatgcaagaatcgatgcaaaggataaaaatacaaggttgcgtcccggcacaaaggttgtcggcagttccccgtccttcgcttcaatttcgatatcatctcttgtcagcgcattcggcgcgagctgatttaaaagagacatatcaagcaagtgatttttgacaccgagcttttcggcaatcgattttgccacatcgatttcttcttggtgacgctgattataatggaatgtaacggtttccacttcttcaaagttttgcaaagcccataataaacaagtcgtgctgtcttggcctccgctgaacaccacaactgctttttcttttttcatgtctttctctcccttatctatcattccataaaaaaagcgcctttttcggaaaaggcgccctaaaaaacataaaaaaaccgtatccaaggatacagctcgtccttagttttttatagagggtgtagctagaacctctcccgcatcaatacggattttcttcttttttcacttttgctatcataccataatgttgtttcccgtgacaataaaaaaacagcctgaaccctgtgtcaggctgcaaaatcgggtttaagccccgcgttttttccccggaaataccatcagcgcaatcccgatcagaacaaataaagcaggccagaaaacagaaaccggaatgatcggctgattcgtcaacataaagcaaagtgctgtcaaggtcagcaccgcaaccgggatgagcagcgccttctgtttcccgccgaacagccacagctcaaataaaccgaatgccgttgccaacaggtaaacaggccatgtcacaccggagtaggaccaattggttgccgtttcaaagacaaacaagatccccgtaatcaataagatgccgcccggtacgagaagtcccgcgtttttgacaggtttcgggccgaaaatcggaatgtgaaaagcggcgcccagcaaaagaatgagagcgggccagccgcgttcgctgatggcttcatttgcattggtgaatatgccgaaaatgcccgcggcgcacagaaccgccgcagcagtcaaaagccctctttgccttctgccgaacagccaggcttcaaacaggccgaacgcaacggcaaagaggtagacaggcgatgtcacatttgcgtatgtccaatccgtcagcgtttcaaaccataacaagcaacccgtcacaagcaaaatgccgcccggaataagaaggcccgatctttttttcggctgcataaaggcagcggcgtgaaacaaaagcgcggctgcgatgatcaaaagcggccacagccccgtcatcagcataccggcaaagcatagtgctcccacggctgtcaggatgaaagcaggaatcaatacacctaacttcctcccgccgaaataccacagctcaaacagaccgagagcaggcgcccatatataaacaggccacgtcacgcctgaatacgtccatcccgttgccgtttcaaaacaaaacaggcagcccagcacaaaaaacataccgcccggaacgagcagtcccgcctggtcaggcgtttttttcgcaaaaataaatccggcgtgaaaccctgcggacattataatgaaaagaaacggccacgccgaacctgcggatagatgaataactcccgccctctgtaaaaaaaacgcaatgccgatacaaataaaaataaatcccaataatacacgtcgagctttcatctcttactcctccccatcatttcccaattcattatacagaaatgtcaggaaaaaagaaggggaattcccaaaaaatacagacattttccttatatccttatttttctttcgggatttttttgcaaatcaatgcgccgatgaaagcgaggctcacatacccaaacaccggataaacggtggaaatcagctgtccgtagccgatttggctgataatgaaagcaaacgccaaaatgccgccgtaaatatatgtactttttatatgaagaaaactgtttaattgtttttccaatccgtataaattgccgatgaccgacgtaaacacttctccgaaaataataaacaaataaatgatatgaagcgaacgcgaatacgaatagacgacttgagccatcggaatgtcaaactccagcacatccggcagcaccgataatgataaaaagctcgcggcaagcaccagtgtcaacagaacgccgccaaaataagccccccttctgatcaccttctctgaagacatttcattcgcaagcggcacaagcacggcttgggcgagcgataaatttaacgcgccgtaagagacggcggacaaaagccaattccacttgtcaggccatacccattcgtccgcgtttctcgtgcttgtaaatacaaatgaatcagctgtcacgataaaagagaaggaaattaaaagcggcacaaccaatatattgacgccgaacacacctttaacgccgcttgtcatgacggcaaagctcagtacgatcgtcaaaaggatccctgcttgtgcggaccagccaagctgttcatgaaacagcgctcccgctccggagagcatgacagaggtcactcccagcaatataaacatcataaacatattaacggcgcggccgatggaattgccgaataaatatgtgttcaattcctgataagatgctgcatgaatccgtttggaaatgatcatgattttggcgcctaaatatgtaaacatcagaccgcttaccacgataccgaacagaccgatccagccaaacttcagaaaaaactcaacgatttcccgtcccgtggcaaaaccggctcctacaaccgtgcctacgtatacaaatgcaagctgacttgcagaaccttttgtttgtcccatttcaccctccggctaagcgcagatttgtccaggcctttatatatgcttatgagacaagtcgcccgaaaagacgaacaaatcgtccttccccggagaaaacagattcacctctctcctctaagcaaaaatattgaaagaaaaaaagggccagagtatactcttcatcaagaaaggtcaaagcatttcatttcctttctgactatattggtcaaaaataatcaaatctcacaaatatcacttatcatgctgtaaacatttatttttcggggtttgaaacaaaacacttgaaagtcaaagaaggtcagagtatactattaatcaaagaaggtcaaagttaagaccttattttctaatccatttggtcaaagatgatcaaacatttttcgaggaggttttggcaaatgcgttgtcaacattgtcagaaaaacgaggcgacgattcgcctgaacatgcaagtcaattccattcaaaaacaattcgttttatgtgaaacatgttatacagaattaacccgaaaaccgtctatgagcatggggccgcaatcattcggattcccgtttgagcaaggtttcgcacccaatcaaaataaacagcaggccggctctgaaaaaggcctgctcgacgagctcgctcaaaacgtcacaaacggcgcaaaagcaggtctgattgatcctgtgatcggccgcgatcatgaagtggcgcgcgtaattgaaattttgaaccgccggaataaaaacaatccggtgctgatcggtgaaccgggcgtcggtaaaacggctattgcagaaggcctcgcgcttaaaatcgctgaaggcgatgtgccgaacaaattgaaaaacaaagagcttttcctgcttgacgtcgcttctctcgtcgccaatacagggatcagaggccagtttgaagaaagaatgaaacaattaatgaacgaattaaaagaacggaaaaacgtcatcttgttcattgacgagattcaccttcttgtaggcgccggctctgccgagggatcaatggatgccgggaacatcctgaaaccggcgcttgccagaggcgagctgcaggtcatcggggcgacaacgctgaaagagtaccgccagattgaaaaagatgcggcgcttgaaagacgcttccagcctgtcatggttcacgagcctacaatagaacaagccatcagcattctggaaggcattaaagataaatatgagaaataccacggcgtcacattcagcaatgaagcgataaacgcctgtgttacgctttcatcccgttacattcaggaccgccacctgccggataaagcgatcgacttattagatgaagccggctctaaggcgaacctggagcttgataccgtaaatgaagaagatgcggctgagagactcaaagcaattgacgcggagaaaacaaaagcgcttcatgaagaaaattatgagcttgccgcgaaactgcgtgatgaagaagcggcgttggaaaagcagctggcgcatgaaacaccggcctcttcacctgaaatcggggcggagcatattcaagccattattgaacagaaaacaggcattccggtcggaaaactccaggctgatgaacaagttaaaatgaaggaacttgaagagcatcttcatcagcgcgtcatcggtcaggaaaaagccgtgaaaaaagtggcgaaagcggtcagacgaagccgcgccggcttaaaatccaaaaacagacctgtcggctccttcctctttgtcggaccgaccggagtcggaaaaaccgagttatcaaagacactcgcagatgaactgttcggtacaaaagattccattatccgtctcgatatgagtgaatacatggaaaaacacgccgtatcaaaaatcatcggttcaccgccgggatatgtcggacacgatgaagccggtcaattaacggaaaaagtgcgccgcaatccgtacagcatcgtgctgctcgatgagattgaaaaagcccaccctgatgtccagcatatgtttctgcagattatggaggacggccgtctgacagacagccagggcagaacggtcagcttcaaagataccgttttgattatgacaagcaacgctggaaccggcgaaaaacaggtgaaagtcggattccaatctgaagagagcgtcctggaagaacaaacgctgattgattcactgagcgcgttcttcaaaccggagtttttaaaccggtttgacagcatcattgaattccaatccctgaaaaaagaacatctcgtgaaaatcgtcagcctgcttctcacagagcttgaagacacattaaaagagcgcggcatcagcctgagcgtaacggacgaagcgaaagaaaaaatcgctgaaatcggctaccacccagctttcggagcacgcccgctcagaagaaccatccaagaattgatcgaggacgaaatgacagatctcttattggataacaacgaaataaaagccttccatgtcgtaatggaagaggacggcatcaaagtccgggcacaataagaaaaaagcggttccctcctcgcggggagccgcttttttgtttctttatccatgtcagaagggagaaactgtgaagaattcgggaacaatttctcaatcaccctaaagttccatgcactgccaccgatattaaccatagaaagctagtataaaggatttggtgaaaactatggataaaacatcgattatcggtatcatcctcgccttgattgctttaagcgtgggcatggtgctgaaaggggtcagcttaagcgcactcgctaacccggcagctattctgattattttgttcggtacgatttctgcggtgatcatcgcattccccggaaaagaaatcaaaaaagtgcctgccctttttaaagtgctgtttaaagaaaacaaacagctgacaattgcgcaattaattcctatgttctctcaatgggcgcaaatcgccagacgtgaaggtctgctcgcattggaagcaagcattgaagacgtggatgacgcatttttaaaaaacggcctaagcatggcggttgacggacaaagcgcagaatttatcagagatattatgactgaggaagttgaagcgatggaagacagacaccaggccggcgcagccatctttacacaagccggcacatatgcgccgacactcggcgttttgggtgcggtcatcggccttatcgccgctctttccaacatgaacaataccgaggcgctcggacatgccatcagtgcggcgtttgtcgccacccttctcgggattttcacaggatatgtactatggcatcccttcgccaacaaactgaaacgcaaatcaaagcaggaagtcaaactgcgtgaaatcatgatcgaaggcgttctgtcagtgcttgaaggacaggccccgaaagtgatcgaacaaaaacttctcatgtatcttcctgcgaatgaacgcgcaaaagtcgctgaacaagaaggagaggcaaacaatggcgagaaaaaagaagaagaagcatgatgacgagcatgtggatgagtcttggctgatcccgtacgcggatttgctcacccttcttttggctctgttcattgtattgttcgccatgagctcggtcgatgcggcgaaattccaaatgctgtctaaatcatttaacgccgtgtttaccggaggcacgggtgttcttgaatattcaagcgtcacccctcctgaaaacgaaaaagacggcgttgatcagttaaaaaaagacaaggaaaaagataaagaacagaaaaagaaagaaagagaagcagccgaccgcgaagaacttgaaggcgtgcaaaagcaagtcaatcaatttataaaaaataaaaagcttgaaactcagctggaaacaaagctgactaaagaaggactcttaattaccattaaagacagtatcttttttgattccggacgggcggatatccgtcaggaagatattccgcttgccaaggaaatctcgaatctccttgtgctgaatccgccaaggaacattatcatcagcggacatacggacaatgtaccgattaaaaactcacaatatcaatctaactggcatttaagcgtcatgcgggccgtcaacttcatggctattctgacagaaaacccgaaacttgacgcaaaagtattcagcgccaaaggtttcggagagtataaaccggccgtgtcgaacaaaaccgccgaagggcgcagcaaaaacaggcgcgtcgaggtattgatacagcctagaaacgccgcgaccgaccaaaatcagtaatataaaaaaggaagcctttcagaatggcttccttttttatttctgatgaaaatgtttagcgtttaaccccactcttttcagcatttccgtacacatttctatctcttcatcactcagcacactgatcatttctttaatttcgtcagcatgatcagggaaaatatcgtccaaaagacggattcccttttcggaaatctgtgcgaaagtcactcttctgtcagtcggcgaggcttttctgatgagaagttcttttttctctaatttgtcaacaacgtatgtaatacttccgctcgctaataaaattttgtcgccgatctgctgaagcggctgtttgcctttgtggtacagcagctcaagcaccgcaaattccgtcgggttcaggccgtgcttatgaatatgtttattcatatggtcgttaatagatcggtacgcacgtgacagtacaataaataatttcaatgagttttctgttttatccgtcatacattcaatcatccttttacaaaagaaaccgttacagagaaacattaataaacaaaatgaaaaatgtcaacaaaaatgtttccaaaatttctcttctttttgtcagaccttaataaaataatttgtttttctatcattttggttattttttcttattaaagaagtataaaaatgatataatacctctattcaagtgtaatgttggagcgatgcagagtgaatacatttaaaggtgcccggggaaagatcaagctttatctcatattggtgatcatcccggcacttattatcagctttttcatttatgaaaaagaaaagcagaaaatagccgataaacacatacaggaagccagtatgatgctcaaccttcaccgcaataagctcaattatttaatcggtgaaacaaaagcccggatgacaacacttgcgatcgctgtcgataagcctgtcaatgaagaaaagatcattgacattctcgatcaggcttttgaggatgaacccagattcagcggactgtatatgctgaattccaaaggtgatgtcatcgcaagcacgactgatctgaaatcaaaggtgaatttggccgacagaccgtattttacgaaggcgaaaaagacgaaaaaaacggtcatcacaaatgactactccagcagaattacaggccagcgcatcttcacgatctgcgtgccggtgttagacgcaaaacgggaagtcacggattatttagtagccgccatacaagtcgattatttgagaaatatgatcaatatgctgagccctgacgtttatgtcaaggcaaccaatcagaataaagtgatatttgccagcggacgggctgatcaatcagaaggtgtgaaaccggtcagcggctatctggatgatattaattggaatatcaatgtttatccgaaaccggttgagctgaacgagctgaccaaaagcgtgctgctgccgatgtccagtattgccgtgctgctgaatattctgttcatcctcgttcaatattatctgcttaagcgcaagacccagctggagcgcgctcaaaatgaagcgcagaaattggagctgatcggaacgcttgccgccagcaccgcccatgaaatccgcaacccgcttacagggatcagcggcttcattcagcttttgcagaaaaaatacaaatcggaggaagatcagctgtatttctcaattattgagcaggagattaaacgaatcaatcagattgtcagtgagtttttagtgcttggaaaacccactgctgaacggttggaagtgaactcgctgcaggatattcttgatgagattatgccgattatttattctgaagggaatctatacaatgtggaagtgaatgtggagatactcgtcaatcggccgctcaaggtcaactgcacgaaagaccatattaaacaggtgattttaaatgtcgcgaaaaacgcgctggaatccatgcaggaaggcggccggctgtccatctatttagaagcccgcgatcataaagcagtcattaaggtggccgacaacggaatgggcatttctgaagatatgcttgagcacatttttcttccgtttgtaacgtcaaaggaaaaaggcaccggcctcggccttgtcgtatgtaaacgaatcatgctgatgtacggcggttcgattgacattcaaagcgaagtcgataagggcacagaggtcaccattaccctccctgccgcttctcgatgaaaaaaacaccctggatcggggtgttttttatttaaagaagaatatgtgtaagaggatatacgagaggaacggcatcatagccggcagatagtacgaggcgcttcgtgagccgtgccagcggaaaaatgtgctgactgtacgcggtcatctttcggatgcagcgcttgatcaggaagcgcattcagtcttcgttatctgttttatcatcaatcatttgtttgcttcatatgcaggcatgacgtcaccgcgggagaacaagcctattttcttcacaaggccctgtattccttggtgatgtgtacgatcacggtttaccagctgctgatacgcgttcatcagacagtccagttcctggctgtgcctgatcgtgtcatatcctgtaaacccttgcctgttagccgcatctatcatcatttttctttttttatcaatagatacaagcaatttttcttgttcagaataactgcccattcacttcacccctcaccgctaaaagaataggaaacaagtttgattgggttattgagcattattacagattatactttatttgtaaacatttttttactaaataacttattttttcatttcatattggaatctttagcatgaatacgagaataatacccattcgggtaatgatataaacagaatgcggcatattcaagattcaaaaaacagccacagctgactttatattacaataaaaaacctctcatgccggcggggcatgagaggttcgggcgtctatcagttttgcacactttcattttcgtaaatcggcacccagccctcagtcgtcacgaagattcggattgcgacgacccggcggtcttcctgaagcgtaaagtagtggcggatgttctccggaactgaaatcaaatctcccggatttaaacggacgtcgaaaaatgtgccgtctttgccttgaatgacgaagatgccgtgtccgctgacgataaagcggacttcatcatccgtgtggtgatgttctctttggaagttttttaataattcatcaagattcggcgtggtgtctgataaagaaatgacatcctgagactgatatccgcgccgggctgaaatgtcctgaatctccgtgtcaaacgccgcgagaatccgttctttttcatcttcggttaggtcgtatttttccgaaagctcagacggaagtttttcaatgttccactgctcatagatcacctcttgttcgtctaagaagcgcgctacttcttcctgatgttcaatgagcgtatttttttcgtcatgaattctgatggtcgccattttctattcctccttttattttaccagctgcggccgaagtgacagaagcttgaggtgacagctgaataaaaattcataggcttccagcacccttttcgcttcaaatgcggtccgcccccatgccgtaatgccgtgattgcggattaacaccgcgcctgatccggcgtccgcatggtgcgcgaagttttcggccaatgccgggatgtgcgccggattgtcaatgatcggaacggtcacggacgcgttttcctcccataatccgagcgccttaatcatctcctgcccctgaaaagtgatttgtttttcatccccgtaaagctctgagatgacattattattgacggtatggacatgcagacagcagccggcgtctgtcttttggtataagtaagtatggagaagcgtttccgctgaaggttttaaagaatggcaggtctcagcgggcttcccgttctcattgattaagagaaaatcttcgtctgtttcttttcgtttgtcttttccgctcgccgtaacgagaaaagtcagcggcccgtcggatactttgatggaaagattcccgctcgttgccgggaaccagtctctttcggccagctcgcgttttacctcggcaagttcgcgccagcgttcttcttttgcagccatgcctgcacctccccgatgttttcaatgcctgttttcacctcataaaaatcttgaaaaggcagatgccggaggccgagttctttgcattcagtcaaaagataatctctcgcaaagcacatatcggacaactttgcagcctcgacatccgtgaccgaatcaccgatcataatgagaaatttctgctgatcggatagcttacggatgactgacggtttgcagcagccgcattgattggtacagtctccgtcacaggcgtgcggccagtctatatgaatatattcattgtcaaaggatgcatgattgcagaaaatccgctccttttctacgatcccttccaaaagcggatgcacaaaaaagtccattcccccgcttacgatataaaacgggaggccgtttgaccggacaaacgagacaaaatccaaaaagccgtcccgtattttcgcatccttcagaataaagccggtcagttcttcttttaagctgctcggcagcagtccgaacatccgtccgactccttcttggattgatatgcttttagacagaacaccgtcttttaattcaagccactcaggaggcgcgaattgtttcatcatgctgacaatgttgtcgttcatggtgaccgttccgtcgaaatcacaaataatcagcggtgtgcgggtcatacggcttccacccttccccatttgtctaatgcgagctgaagatctttgcacgacgcggctttttcttcaatcggctgcgcttcaagcaccgcatcaatgatggcgcggaacgcttttcccccgccctcggctcctttcggatggccgtgaatgcctccgccggcattgatgatgtgatcgatgccgaaatcgcgcatcaacaatggcaccataccggggtgaatgcctgctgacgggacggcaaacgacggatgaaagacatcgtcttttacacattcatcatggattgcaagcgcggactccttcggaagagcaacggatccgtaaggtgacggaaataaactgaaatcagcgccgcaatagcggttcagcttgccgagcaaaagcgcatgcgacaagccgtaaacgggagatgatgtgaacgcgccgctgactgccggatgcgccatgatcggaagcgggatttccctgtcttcagcaaggctctgcatcacatctaaaccgtaagcgaacacattcaataaaagcgcgtccgccccgagttctgccgcgcgcctcgctttatcccgcaattcagcggtccttcccgtaaggtttacggcatacagcgttttatgccccgtctcctcccgggtttccttcaggacttgttttccttcgataatgcgggtttcaaacggagccagttcattttcaaagaaaatttcgtcatctttaatcagatccacgccgccgagcgcctgctgtctgagctgttctttaatgtcggcgagatcccgtccgatcacgcctttaaatatgctcatcagaagcggtctttcaaattcgcccagcagtttgcggatgccgtatataccgaatttcggcccgggaagggagcgtttaaacccttcggaaaattcaagatcagtcaattttatttttccgtccagtgacagctttccgaataccgtcgtcaggacggccggaatatctcttgaaaagttcgcctcgggataggcgatggtgatgacggattgtgtttcgttttctgaggttccttctttctcctcaacttttacgacccgccctttatgttttctgagctgttcctgcttcaccaggggcaggtcagtccaggagcctaccgtcagccccgccgcaatctgttccgcccgcttttcactgtccgttgtgtctgtcagaagatatgttgccaatacttcgctcatgcgtgaacgcctctctttctttcgcaaaacataaaaaaacctcttccgtatgagcagaaagaggcttcgtgttatgtccgaatcttatctctcagctcctgctgcaagaattagcaccgtgctttatcagtcggttgccgggcttcatcgggctcgtccctctgcctgctcttgataagaataatgattttataaagtattttgaattatcgcattgttattctgatatgtcaatgctttttcgggtgaaaagattcagtttcccgatccgttccgcagcttctttaagtctttcttcacttgtcagaagaccgactcttatatagccttccccccattttccgaacccgtttccggcagcgaccgcgacatccgctttctcgagcagcaggtctgaaaacgactgtgacgtataaccgtcaggcacagggagccatgcaaaaaaagagcccgccggagccgttacatcccagccgatatcgcggcaggctttaatccatgcattgcgtctcgattcatatctgtcattttgcgccgcgacgcatgcctgatccgctaaaagtgcggctgccgccgcctgctgcgccgcgggaaacaggctgacaaacatatgatcctgataaaggttgatcgcttcgatgacagaagcgtttccgacagcaaatccgacccgccagcccgccatattatacgttttggacaaggtatagatttcgattcccgtctcttttgcgccttcggtctgcaaaaagctcagcggtttatgcccgtcaaagccgacggctccgtacgcgaaatcatgaacgacacaaatgccgttttgctccgcaaaaccgaccgtctcctcaaaaaacgcctctgtcgccacagcgccggtcggattattcggataattgagatacagcagcttcgcctcgctccgcaccttttcaggaattacgctgtaatcagggagaaaccctctttcttccgtcagcggcatcatttccattttcgcttttgcaagggcgacgcctgaccagtaatcaggatatccgggatcaggcaccagaatggtatctcccgggtttaaaagacattgcggaagctcaacaagtcccgccttgcctccgaacagcacggcgacttccgtttccggatcaagcgtgaccccgtactccctttcataaaatgcagcggctgcttttttgaagctgtaagcgccccggaatgatgagtatttatgattttccggcctttcgacggcgcgcttcatttcttcaacgatatgctgtggcgtcggctgatcagggtttccctgccctaaattgatgacgtctctgccttctttcagcttttgattcactttttgcaccaatgatgcgaaaaattgttccggcagctgtttgagtacatctgagatttcaaagttcatattttcaccttctaaaaatgtcttgaaatgatagtccatcatcatatatggttaaataaaaaaagtaaagagaaacttgaggtgttaaaaaatgaaatggaccgtttcctgtttgcaatttgatatttcatacggaaatccttcagaaaactttaaaaaagcagaatctttgattgagcaggaaagccgccatgcggatgtaatcgtgcttcctgagttgtggacgaccggctatgatctcacacggctagaccagcttgcggatgaaaacggcaaagtttcggaacaatggcttaaagaaacggcaaaaacatacaacgtacacctcgttgccggatcttttgcggtcaaagaaggcaaaaatgtctataacaccatgtacatcgccgataacagcggacagatcgtgaagcggtatcagaaagcccatctgtttcagctgatggatgaacacctttacttgtcagcaggaaacagcgacggttcctttgagcttgacggtgtcaagtgcgccgggctgatctgctatgatatccgtttccccgaatggatcagaaagcatacgtcccagggcgcgaatgtcctgtttatctctgcggaatggcctctgccccgccttgatcattggcgaagcctgcttatcgccagagcaattgaaaaccaatgttttgtcgcagcctctaactgcacggggtccaatcccgataatgaatttgccggccacagcctgattattgacccgtggggccggattttagccgaaggagaccggacggaaggcgcagtccgagcggaaatcgatgtgtcagaaagcgcggccgttcgcggaaccattccggttttccaagacttacggcgtgatttatattaattttcaaaaaaacgttgacaagaatatccggcacctgctaatattttcatcaactgattaatccgaattgtgatacaaatcaatatatttttctcttatcgagagttgggcgagggattggccttttgaccccaacagcaaccgaccgtaattccattgtgaaatggggcgcgtacattttgcgccgagacgattgtctcataaggcacggtgctaattccatcagatgttatctgagagataagaggcggactgcactgtttcagcctccttctctttcagagaaggaggctttttttcgggcgtattctccgtcacgatctcttactgccactacataattggagggtaaatccatgtcagcaactaaaacaagtctttatgaacaattaacagaaagctccgccgccgcgttagccgtcaagctcggcttattccaaaacaaaagcactctgacatgccgtgaaatcggcgacggcaatttaaattacgtctttcatgtttacgataaagaaaacaaaaaaggactgattatcaaacaggcgattccttacgcgaaagtcgtcggtgaaagctggccgcttaccattgaccgggcgagaatcgaaagcagcgccctcatccgccagggcgaacacgtgccgcacctcgttccggccgtttactattccgatactgaaatggccgtcacggtaatggaagacctctcgcatttgcgaatttcaagaaaagggctgctggaagggcagcattatccgaacttatcggttcatatcggtgaatttttagggaaaacgctgttttactcatctgattatgcgcttgatgcgaaagtaaagcagcagctcgcaaagcagtttacaaatcctgagctttgcaatattacggaaaggcttgtgtttacagaaccgtttctcgaccatgagacaaacgattttgaagaggagctgcgcccatacgcagaaaaagtttggaacaattcccggctgaaacaaggcgctgacgaattgaaagccatctttctgaattccgcggaaacattggttcacggcgatctgcacacaggaagcatcttcgccgatgaacatgaaacaaaggtgattgatcccgagtttgctttcttcggaccgatcgggtttgacatcggccaatttatcgccaatctgctgttaaacgccctcagccgcgacggtgacgacagacagccgttatatgatcatactgccgccgtatgggatacatttgtgaaaacattcagtgaagcatgggagaaagactgcttgccttcccgcagacacctgctggaagacacactgaaaaacgcgtttgaggaagcggtcggttttgcgggatgcgaactgatccggcgcacgatcggactcgctcatgtggctgacttagatgaaatcactccgtttgacaaacgaatcgaacggaagaagctggcgcttgacatcggcgcctattatatcgaaaacagaaaagaactgaagcatatcaccgaggttctggaccaatttaagctccgtgtaaaggaatgatgcagcatgaccaatgaatttgccatcccccgttctgtagaatggaaagaaacctacatccgcattttaaatcagcaaaagcttcccgacgtcactgaatatgtggaacttgaaacaaaggaagatgtattcgacgcgattgtcacgctgaaagtaaggggcgccccggccatcggtataaccgcggcgttcggactcgcgctctccgccaagtcgtttgaagcccgcgatctttcagatttccgacgtcagttcgcagatgtcaaaacgtatttaaacagttcgaggcccactgccgtcaacctcgcgtgggcgcttgacagactgacggattcgatcagggatgcgatctcaatcaatgaagcgaagacaacgctcgttcatgaagccattcaaattcagattgaggatgaagaaacatgccgtatgatcggccaaaatgcgctgcacctttttaaaaaaggcgaccagatcatgaccatctgcaatgcgggctcgatcgccacaagccggtacggtacggcgcttgctcccttttacttagcaaaacaaaaagacctcggccttcatatctacgcatgtgaaacaagacccgttctccaaggatcacggctgacggcgtgggagctgatgcagggcggaattgatgtcacgctcattaccgacagcatggccgcccatacaatgaaggaaaaacatatttctgcagtcattgtcggcgctgacagaattgcaaaaaacggtgatacggccaacaaaatcggaacgtacggcctcgctattttggcaaacgcctttcaaattccgttttttgttgccgcaccgctttcgacatttgacttgcagattgaaaacggcgatcagattccgattgaagaaagagatccggatgaagtcagacagatctccggcatacgcaccgctcccgaggatgtgccggtcttcaatccggcctttgacatcacaccgggcagcctgatttccggcattataaccgagaaaggaattgtgaccggctcttacacggaagaaattgaacaattattcgctgactgccagctaagctgaaaaaccgctgatgatattgcctcaggcaatgtcagcggtttttttgtctgcacaatgtaatcacttcatctttttggacggctgtaatgagatgcattttaaaaaacagctctgcataaccggctatcttttgcggacggctcattttcatcaggcttcgtcctcctttttcatcagaccaacttttttcacttaataaaatgatatgtcggacgtgaaaaaacggaacgtgccatacgctttatttttctttataggatatttgttcgatgttcagcagcaccgcttttacatccgtcttcgtgccagcgtatcccgttaaggcgctgtttttgccgattacccgatggcacgggatcaaaatgggcagccggtttcgtttattggcttgtccgatggcgcgcaccgctttcggtttcccgatcgcttcagccatatcgccgtagcttcgggattccccgtaaggaatcatcgtcagcgcgttccataccctttcctgaaagggtgtgcctttttgtctcagaggcagagagaattgctttctttctccagaaaaatatgatgccagctgctgtttcgcctccgacagcaaagcggtttcgcacggctttacgccgggcgcatctttccgccattcctcaaaatcttccccggtgagaaacaggccggtaataaagctctcttcctctgttacgatgacggttccaaacggtactttcatacttgtaaaacagatcattcgccgctccttctttcttcggtattctgccggatcggaagcgtcaaatgaaaaacggtgcccttcccttcttcactttccacatgaatgcgtccctgatgttcttcgatgattttatagctgaccatgagaccgagacccgttcccctgtcttttgtcgtgtaaaatggttcacccagacgttttaatttgtcttcggaaatgcctgttccttcatcttgaatagaaatcaaaatgtggtcttgatcagaagactgaatggtcacgtagatattgccgccgcccggcatgacttcaatggcgttttttaaaatattgataaacacctgttttaattgattcggttcacagtaaatcggcgggatgtttccggtcaggttcagatggatctgcacattgacaagattggcctgggcattcaaaagatcagccgtatctttcataatctgcgtcacgtctttttcttcatataatatcgcctggggtttcgctaaaattaaaaattcagtgatgatagactcgatgcgttttaattctgaggtaatgacgttaaagtacagagaatattcgccttcaatgcttccttgaagaagctgaatgaatcctttcagcgccgtcatcgggtttctgatttcgtgggcgatgcccgccgccagctcccctacaacatgaagagtgtcggatttccgcagcctctcttcaagctctttggcctctgtgacatctttaaagatggccagattcatattttgaatgatatttcttttgaaggagaattccagtttgcggctgtcgctgctgcttaacaggaaggggatttcattatccattccttctaaatcaatctttctggcgggaacacccgcgttttcaatatcaaataaagaaagaatatccggaacggtgtacgctctcagctcctcatccggcataccgagtatacggcttgcgagaggattcgcgtcaataatgcggaattggttgtcaaataagaccttgccgtccattgagccgttgaatacttttctgaatttcagctcgctttcccgcaattctttttccatccgcttacgatcgctgacatttcttaaaatggttaaatgctgaccttcaagtatggttcgttttgatgtgaattccagctctttaaattggccgtttgccatctgaaacagcatttcttcacggatttccccgtatttttcatattttttcttaatctgcttatattttttctgcggatcaacgataaacgtacataaattcgtctccaccagcttatccatcggcagttcgaaaatgcggcacgccgattcgtttgctttggcaatctttccgtcatcagaccaaatgacaatcgcgtccatggcgttttcaaaaatttcgcggaatcgctcttcgcttttaaaaagtttcaattccatcaaccgtttctctgttatgtccctcataatggacatgtagaacccgctgattaagttggacgtaatcgtaaattcaaacagcttctcttcgcccgaccgaagcttgacgggcagttctcctttggcgtttccttttctgcggagggtttcccagatttctttcagatgctttttgttttctccgtcggtaaaatggcggagcgacagatgggacaattcattctggccgatctcaaagcttttgcaaaaagagaggttcgcatcaataaacccgccgtccttatcaaacagcacgatgccgtcgacagccctgtcaaacaaatctttaaacagctgctcgttcatggagaattcgcgctctaatatttttttagaggagatatccctcatcaccacaaaaaaataatcctccccaattccgtctctggcgaggaattcaatgtatttcgtcgcgccgctgtcaagcttaatcggcacctctttccacagatggcctttttttaaaaactttttcacggccttattcagttcttcctgaggcacggaatataaaaaatccaggacggagcggttaatgaggttctctgcctcaatctgcatcatccgggccgcagcctcgttcgcctggacgattttcatttccttacggcatataaaaatggcatcaagcgtgttattcataatcacgtgataccggttcaaatcactcttcaggcggtcattttcctctttcatccgcttcagctgctctttcagcgactcttttgtttgcaaatccagagtttcagccattcagtacactccttcttcaaaaacctatccttcaatatttctacaaaatacctcatcttccttcattcgccctatacatttcagaaaatttcaatgatatgacaagttaaagtctttttctacgatccttacctccccattacatcatcctaacaatcacttttgtcctccttcaattttttgttttttattttaaaatgaacaccaacaggaaataatcatgcagtggatgatttttgaagagaaggtgatgctatgacaaaatcgcgagacagttactttgacaacgccaagtttatcttgatttttctggtggtgttcggccatatcctccggtcatttattaacggaaatgagtttatgctccatctctacaaattcatttatacttttcatatgccggcctttatcctggtttccggctatttcgcaaaaaactttaagcggaaaggttatgtgaagaagctggctgtgaagctgattattccgtacttgatttttcagggcatttactcagttttttactatttgattcaggatgaaagcatggcaagcgtcaatccgattgatccgcagtggtctctctggtttttagtcagcttattcttttggaatctgctgctttacccctttacgaagctgccgaaaatgtgggcgcttggggcgagctgcgggcttgccgtcatgatcgggtatcttgattttatcagcagcacgctgagtctttcacggacgtttgtttttctaccgatgtttcttgtcgggttttatttaaagaaacagcactttgatttgcttcgggctaaaagaggcaggcagattgccgcgggcgtactggggattgttttcctcttatgctggtgtattgattttgattactcgtggctgttcggttcggagccttattctacattcggcacagtgtcgctgttgagcggtctgtcgcgcatcggctggtatgttttggcctttgccgccactttcagctttttggcgctcgttccgcaaaagcgttatttctttacgaaatggggtacgagaacgttttacgtgtatctgctgcatggattcattataaaaacgctgcggcagatcgggcttgaagatcacttgtctgattatcagaatttagtcatgctcttaattttaacggccgctcttacgtccattctctccagcaatgcggtgaaaacggccgcacagccgtttattgagctgcggatcaccggctggcttgaagcggtgaaaggaacaagaaacggtgcttattcgaaataatgcaaaatacctcttaagcgttatcgcctaagaggtattttttattgtttgccgtcttcttttttctttggcttcgtctgttcaagcgtttcaatccattttccggcgttataatcaccgagctcgcttgcaaactcttcttcaagcaatttagggtccatcggctttttatggttttgcatgtctttgctgtggcggttttttttcgtcatgttactcgcctccttgtttgccgtgttttgatttgcggtttgcgcctctcagtccgggatcaccgtcatattgtgttttgtatgcatctttgtccatgctctcagtcggtgtgttgttgttggtcaaagcttcattctttgctgctttgcgtttcatttgatttcctccttctgtcagcaaatctgttttgaattcatcaagcatttttttcaagtcgcgcactgtcacgtttttggcctcatcaatgagttcatagccgatctgtccgttcggctcaagcagcacatatttaaaatcttgaatgtttccgaggccttcctgcctgatcctcattgacagctgagcttcggtaaaacgcattttttttaagttttccgggatgatttttccgtttctgacaacggcgacggtttttcctgaaaataaaaactcaaaaaagcttgatttgatttctaaatattccatcaggattaataccgcaataaaaatcgccgccgcgaaaatagtttcccataaattatgttcaataaacggctgaataataatcgagccgatcgaaatcatgatgactgtctgggtcaccgacagctggctgattgatttccgtccggcaatccgcaataaaaaggtaccgaccgctatcataactaccgacttccaaaatacggcaaacaatgacgtcacctctttacaagtagaatctccaaagaaactgtttccactcatccattttacggcaataaaaaacaccgctttctgaaaagcggtgtcagccgataattattctttccttcggatagtgataatttgcttcgatttcttttcggccgatcagataaaggaacgtcaaaatgccgatccggccgataaacatgacaatcatgatgacgcattttccgatgtcgcttaaatgcggagtaatcccaagcgacaggccggtcgttccgaatgcggaacacacttcaaacagcagtccgagcagcgtctgatttgtctccgtcacggccagaatcagcgtcgatccgaacacgagcagaatcgccatcatcgtaacgaccagcgacttcatgacatcagcctggtgaagctcgcgtttaaagaccttgaccgctttattcccccgggcaaaatgaaacagggcaagaaggttaagcgcaaacgtcgtcgtacggattccgccgccgaccgagctcggtgatgcgccgatgaacatgagggcgcagatgaaaaataatgtcggcgccgacagctggctgatgtcaattgtcgcaagcccgccgcttcgcgtagcggttgattgaaagagacataaaaataaaacatcatgccagcttttccccttcatgacatggcttgcttcaagcgcgtaaatgcccacggctccgaacaaaacgagcattccgaacgtaacggtcgtaattttcgtaaacagcgtgaatgagtatctgcgctgttttgaaaacaaaaagtcctttacttctacgagcaccggaaaaccgatcgcaccgaaaataatcagaatcatcgtaataaactgcacgaaatagtcatgtctgaacgggacgagtgaatttcccgtaatatcaaaaccgccgtttgtcgtggcgctgacgctcgcaaagaatccgtgcaagtacgcctgttcaaacgaatcataatacgttaaaaaatatgttcctaagatgatgccgcctaaaaactcgattaataaaatcaaaaacagtacttgcttcatcaggttgacgataccggaaaactgcgattgattctgatccaccatgatgagcttccgttcccgcagaccgatccgtttgcccataatgagccagacgaatgttccgagcgtcatgatgccgattccgccgaattgaagcacgaaagccaaaatgacaatcccggccgtgctgaatgtatcagccgtgttgacgaccgttaaaccggtgacactgactgagctgacagccgtaaacagcgcgtctataaacgaccagctggccccttgtttgtgggcggccggcagacttagcaaaataaatgccaccgtcacagcaagaaaataatataatgcaatcagctgtgcaggcgacaagatctgtatgaatttcttcagtgttaatttcataagatagttccttctgcctctcaaatgtagtacgtaattattctaatgatattgggagtatttttaaagggctttttagaaagatttttcattaccttatgtaatttgccgatctttaaacaaaaaacctctgaaacgattgtcagaggttttgttgattattttgcttccagcctgcggatgcgctcatcgagatcagggtgtgtggagaacagtgacgaatgctttttgccgttaatttttaacgtctgcaccgccgtctggtcttcttcattcacatgtcctgtataagacttcagcgtacgcagggcgtgaatcattttatccttgccggcaaggtctgcaccgccgcggtcagcgtgaaactctctgtggcgcgagtaggcgaagacgacaagactgccgagaatggaaaagataatctgaaacacgatcatcgcgataaaatgaacgaccggcgcgaggtcttctttgacaaagcggcttgcaacccatgccgcgattcgggaaaggaatacgacgaacgtattgacgattccctgcagcagcgtcatcgtgaccatatcaccgtttgtgatgtgtgcgacttcatgggcaaggaccccttccaccgcagcatcatccatctgctgcaataaacctgaagaaaccgcgacaagcgaacggcgcttagaaggtccggtcgcaaaagcattgacctccggggaatgataaatgccgacttcaggcattttcgtcatccctgcggcacgggacaatctgtgcacacggtcaaccaattgctgttcttcatagctgagcgactgtttctttggatttaacacccggacgcccatcatcgttttggccatccatctggacattccgagagaaataaaagaaccgacaaaaccgacgacaagactgaacacgagcaatgccatcagatcaatgcggccattttgtatatacgagccgacaccggtaacgcttgtaataatcgtaagcacaattccgattgtcgtaatgaccaaaaggttcgttaaaataaacagaaatattcttttcgccataattacctccgtcttttttaagatcaaaagaacttatttacttaaattataaatgatctgtttgaaaatgcaacaatttcgacgtatgatgttaatgtaattcccattgatattaaaaagtaacacgtaatcaatcagaggtgaaccatgaacacgtttaaactgacccgaactgatatggtccggcttctttacgcgctaaaaggccaaggagacgcaacccctctccaaatcttattgcaatcagcggatatgaccttggatgaagcggaaagccgtctgcatatccctgaatttctgacgagattcgaacgaaaaaaagagaaaaaggaatacgggctttcaactaacgagattgtcgagctgggaaatctgtgcgagctgacgtctttaaaatcaaccgccgtccaaaactgggtgaagcgcgatattaaagatttaatcggccaccccttactcggcaaaaaatatacaattgaacaagctgtcatccttctcattgtacgtgatttaaaatcaatttatgacttcgaacatatacgcggcatattaaaaatcgcttttaacacgatcacagacagatcagacgacgtcatcagcccgatcagctactatgaaagctgcgcccaagtgattgattatcttcatcataaggcaaacccgccgatgaaggaaacgagcctgcaggagctcgtcgaagagcagacggacaagctcaaaagctgctttaaagaactcggaggcagacaatggaacaatatcagatccataatcgccgtcacggtgctctccgttttgactttccatattcaagcctcagcctacaaaatgacgagccatttattataattcataacgcttcttcgccccggtgtctgcgccggggtttttttgctgtacaacaattgccagcataatcaataccgttccgtttgaaactaaaatgcgaaaacacatcttgccagagaaaaggagatgaaaaagatggcgagcagaaataaactcttagttccaggggctgagcaggcacttgaccaatttaaatacgaagtggctcaagaattcggcgtgaaccttagctctgatacagcagcacgcgcaaacggctctgtaggcggggaaatgacaaaacgtcttgtacagcaggctcaatcacaattaaacgggaaaaatcaataatgcagcttattcgccgggacttctcggcgaattttgatatttatcggcattctcctttccgtgccggtagccattcggattccttcggtctgatgaatcttcatgatgccgataggattcccaatgttcattgcgatcatgattccagtaatgattgtaatacttttgcttaggctctttgtcatttccgttttcctgaggattttgtgttgggggctgctctgtttccccatcttgttccttctgtgtgttttcctctgatccggaagctgcatttttttcggtttgctgattgccgtcctgactgtccggcttcgcttcttccgtaccgggcgttgtttcattgtttcccggcttctctgctgccttttcttcatcaggagctgtcttttcatcagccgccggcttttctgtgtccggctgctcgctttgatcagcgtctgtttcggtatctttttgatctgtttcattgccgtcggtttgcttttcaggctgtttttcgtctgttttcttttcgtttcttcttatgtagctgcctgttgacatcccttcctgttttgctttttctcttgtttccatatcagattcaagcgattggacctggtaggtgcccttatatttttcagtcatgtcggccagctgttttttaacgccttttttatatgtattgtcatctgtattttcataaaccgtggaaattaaaatctcttttgattcctttacatatccatgcttgctgcaatcggtaataatattactgatgacttccttaaaatcgctgcttttccaatctccgatgtcactgatgacctgtttggcgtcatggttcagcggtgtcagttcaatgacttcatatttgctgtttaaagccatttcaatgctgggattaatgtcaagcgtcatatacgcgtaagctttgttatcagaaaaaaccgggagcaaaattaaaataaacaaaataatagcagtcatcgtaaacactcccaatttaaaagggcgcagtttcagaaaatcaaaaaagctggcccttcttcccatacgcgtttcgccttcgaacgtaatttcctctccgatttcacaagtgcggtgatcattttttgtttttaaaaattgtccgtcaggggttagcaacgtgacgaattttttatttttctctactatgatccctcttctcatgagtgcaacacccctttaagataatcttttaaataaatataatcaccggtaataataatactcatggcgatgatatattttcggttccgttcgatcgtttttctgctgaccgacacgagctgctccagctgcttgacaggaagctgttttttctggtgcaaaatggacgccagctcttcattttcaacaagcgtgtaggctaccttaatcgcattctgcctcgcatctgtatgcttcggcgattgttccagcagctctttaaaagacaggccgtattctttcagctgcttctgaaaaaaaagaatttcttcccggcgctgttcctgttctatctgtttgcggtattcatcaatggaaagctccgcttcgataaggctctgcgaagattcctggtcgtcgccttcctgcacatccatattgatatgctgagcggttcttgcttcttttctgatatagtctatcacttttctttttataatcagctctgcaaatgcaagcagcgaattacctttttcagccgaatatttttcaatggcttcgttaaacgcgatcagcccgatgctgaattcgtcgtctttttcatctatatatcgtttacaaacggatgaaaccgtcttcgcgataaaaggcttatattgctgtattaaatcgttctgcagatctttgtcgcctttttgtattttttcaacagatgtttcaagcgtttgcttcttttttcccaatttaaacaaaaggctaagcactggtttcacctcagttcctccctataactactcataatcatagctaatttagtagggattcgcaaaggaagaaaaagagaaatcgatttcatttgtctcaattatgacaagccaataagacgtactatacatgatttcgtgcccccatgcagaattaagggggttttctctgtgttttttgtaacaatgctgttataaaattgttatcatatgtcttaaatgtaagcgtttcaaacaaaaaagggaacctgctttataaaaagccagactccctttttgatcattttacgcgtgttctcttttttccgattccgcgtcagactctatttgttttgctcctgacataaaccatccgcaaaccgcaatggcagccagaaccgcccagaaaatgattttccaggccgccgaatggatgacatctgccggaatgataccgagttcctcatgagccaatgtataaagagcgagcttcacgcctacccatccgacaatcacaaatgccgccgtttcaaggcccggcctggttttcagtaaggatacgaacatcgatgccgcaaaacgcataatgattaaaccgattacgccgccggctaaaataacgagaaactgaccgccgtccaagccgccgatggcaggaagctgagttcccgggagcgttacggcaagcgcgaccgccgctaaaatggagtcaacggcaaaagcgatgtccgcgagctccactttcaagacagtctgccaaaacccgctttctttctgcattttctgaccggcgttatctttaaatacataccgcttcagcaaatggctgaccgcaatgtaaaacagatataacgcgccgacggcctggacctgccaaacattcaccagaaaagaaatggcgaacagcgacccgaaacgcaaaataaatgcgcccgccaatccgtaaaataaagccttcttcctttgtttttcaggaagatgcttcaccatcacagccatcaccagcgcgttatccgccgccaaaatcccttcaagcccgattaaaacgagaagaacccatccatactccaataataatgcaaagtccaatccattccctccgtttcttttttctatcatccgagcttataccggcggttttttacgcaaaaaagacctttgccgatataaggcaaaggtcttgctagacatgaatgattggcatgccaacaaagccgatggatataatccatgaattgacgactttgtttccggaatatccggacgctactcccctttgggatttcaagaaatatttgtttatacgcatatgataaagcctgtttcatcatttgtcaacgcttaacttttttaacaaattgagaaattttttctgttttggcccgctgttttcttctctttaaaaacatccaaagaatgagaagcaacacaatgaatataccgagcggcagcatatattgatcgagaatggaaccgacgcttttccaattttccccgagtttcattccgaggtatacgtaagcaaatgtaatcggcagcatcgctgcatatgtatatagagagaacacccagacattcatcttcgcaatgccgcacggcaaagaaatcagcgtcctgacccccggtataaaacggccgctgaacgcgaccaaacctccgtgcttctgaaagaaatcatctgatttctgcagggattcgggttttatccatatatactttccatatttcagcaaaaacggccgaccgcccagcctgccgattccatataagacaagcggacctgaaacaccgccgagcgaaccggcaaacacggtcccggcaagtgtcatatccccttttgagacccaatagcccgctagcggaagaacaatttccgccgggatgaattctatactgagcgccaaaaaaatcccggcgtaagataagcttttaaacgcctctattattgatatgatgaattcttcgatgatctatcactcccggcttacgtctatattccgaaacttaagaatgattttaacacaaaaccttgaggctgaaatatcttttagacatgcccgttataaatgtgagtcgtttcagatcggtatagcgggagggaatgacatgcgcaatacaacgtcccgcctgtctcctgattgcttgtctggcggcgtttacatcacttaagatctccggaaaagtaagcggcggctgaccgcggattcagttcatatgggagctggaaattttctcagtcaccacatgggaatgcgtgggcatttcccggggaatgattttgtataatctttttgattaccgctgatgattttcagggacttcagcgctttaaagaacttaccgattcactgattgtaaataaagaattcatttgcttttcagccgaccatttccgcctgaggaaatggaacagccgctccatgaagcgccgcaacacccataagttgctacacatggaacggacccgtttatccacaataaagacaaaaaggagtttttattcatgcacacgatgtggaagggttcgatcagtttcggcctcgtcaatatcccggtcaagctctttgcggccactgaagataaagatataaaattccgcagtcttcataaagaagaccatgcgccgattaaatacgaaaaaatctgcaccggatgtgaaaaaagtctggagcctgatgaaatcgtgaaaggctatgagtatgtaaaagggaaatacgtcattatgacagacgaagacttgaaagacgtaaaacaggaacatgaagaaaaagcggttgagattgttgactttgtccagctgcaggaaattgatccgatttattttaaccggtcatattatgtcgggccgggagataacggcacaaaagcctatacacttctgcgggaagcgctgaggacgacgggtaaaatcgggattgcctccattacgatccgctctaaacagcagcttgcgattcttcgcgtgtatgacaactgcatcgtgatggaatccattcattatccggatgaagtcagaaatgccggacatgtgccgggtgttcccgagcagacagccgttaatgaaaaagagctgcagacggcgattacgttaattaatgagctgacaaccgagtttgacccggaacaatacgaagatacgtaccggaaagcccttctcgctaaaattaacgataagctcgaacatgaggaagcgggcgtgacaccggctgctgccggcccgcgcgaagatgtcatcgatcttgtcagcgcgcttcaggcaagcattgaccggacgaagcggccggatcgcgaacaggctgcgccggcgcggacaaaagacgccgcgtcagcaggcggcggaggcaaaaagcagaaaacgaccagacaaaaagccggaacgtcttaatcatggtgctgacgatgcagccgattttgacctctgtaccgcctgaaggcagtgagtggcgctatgaggtaaagtatgacgggttccgctgtcttctccgcatagacgaaagcggcgtgacattaaccagcagaaacggccagacgctgacgagtcaatttccggaaatcacagcttttgcggctcggtgttttcagcacatgaaagacaggttccccattacgcttgacggagagcttgtctatttaatcaatccgtacagagcggactttgagcatcttcaaatccgcggacgtttaaaacggacggaagcaattgaaagcaacgctgatagacggccgtgccgctttctggcatttgatctcctcgttctggaaggcgccggcaccgtctcattaccgtatgtgaaacggaagcgcgccctttccaaactgtttaaagaagcaaatcttcccgcctgccctcatcacttagcggaagaagcgattcaatacattccggaacacactgactttgatgcgctttgggacaaggtcgtccgccatgacggagaaggtatcgtagcaaaaagggcttccagcggctgggcggaaaataaacgctcccccgactggcaaaagtataaacatatgaaaacggcacatgtgctattaaccgggtttaatccgaagaacgggtatgtaacggcctctgttttaaaagacggcatcgccgtcccgatcgcgtccgtttcccacggcatgcaggcggaagaaaaaaacgccgtcagaaccattatggagacccacggaaaaaaacaaaaaagcggcgagtatacacttgagccttctatctgcatgaccgtgcagtatttaaccatattgcaggacacgctgcgtgaagtatcttttgtgtcttttcagtttgaaatggattggacggaatgcacgtatcaacagcttatccttcactctaaaacgctgccgccgaagctgcagttcacaagtctggataagattgtttttaaaaaacgtgaaaaaacgaaagcagatttccttagttatatggtgaaaatgagcgattttctgatgccctttcttaaagatcgtgccgtcacggtgatccgttatccgcacggcgcgcctggcgaatctttttttcaaaaaaacaaaccggactacacgccggactttgtctcaagcgtgtttgacgggagccacgagcacatcgtatgcagcagcataccgtcacttttatggctggctaatcagctggcgcttgaatttcacgttccgtttcagacagtgcattctgaaaggcccgcagagattgtcattgatcttgatcctccgtcaaggaatgattttcctatggcagtggaggctgcgcatgtgctgaaacagctgtttgactcattcagcattacgtcattcccgaagctctccggaaataaaggcattcagctctacatcccgctttcaccggaagcattcacctatgaagaaacccgtgcgttcacaatgctcgtcgccgattattgcgtcaggacgcggccggatctttttacgacagagcggtttatcaaaaaccgaaacggcagactctacctagattatttgcagcatgccgaagggaaaaccattatcgccccctattcgacccggggcaacgaattgggaacggttgcggctcccctttattggagcgaagtcaactcctctttaacacctgatgattatacgatcgatacagtagtgaaccgcgtcaggacagagggagatccgttttatgatttttaccggaacccgcaggacggcccgctttcaatcgtgcttgagcaaatcaagagaaagagctgacgctttttgtcagctcttttcagtctgatacgtgcacatcaatttttctttggaaataaataaatagcaggagtaaggaatgtttttgagggtgagctgttttgcagtaaagtataaaatgggaatatgggccgctttcttaaacagcctgtagcagccgctggacggttttatcacatcaaaaccgagtctcgcagctcctttatgaagcattgtaatgccgacgactcccttaatctcgtctttccgtttatgctggttaatataatccgctaaatgaggcatggattgatataccttctgatatagcataatcccccttctgaccgcgctttcaataggctgcagctctttcaggagtttgacattatgaagatgaatcttaactaacacgtcgttttttttaattctggttccgtcgctcaggatgacatcttttcctttatatctagtcaaacggacgcggaatacattcgattgccgtttatcaatcagcgtcagccgggtaaagaagaaataaagcggatcaagtaagtaccatatagacagcagacagcttctcacatgttcaccttctttataatcaaagcaccctcatattttggcatggggcgtgtcacattatgattggtaaataatgatgccgacctgtatcagcttatgcaaaaaccgcttcaggctctactgtccggaacagaaaaaaaacactcttcgtgaagaagagtgtctgtatccgctttcttttaacggaaaagcaaatgctggctgtgaattcccgcttttttcagtaaggctatcagctgttcctgttcctcaggcataagtcctgaaaacgctctcgcaattctcaatgaatgaatcggataaattttatccaaatactcgtttcctttatcagttaaatgggcgtaaacagaccgtttgtccttcgggtcttgttctctgaccaaaaacccgtttctttcaagcttgtcgatgacataggtgacattcccgctgacaagcaaaagacgcgacccgatttgctgaagcttttgcggtcctctcgtataaagcagctccaaaacggcaaattcagtcggattaaaaccgtgttctttactgtcgcggatgctgtgttcagacacactcttgaaagcccttgcaaaaactttgtacaaattcatcgaacgcatcacttcttcttcgttaaatgataatctcatcatatctaccccgtatttaagatttttataaaaaaataatgtaaacccttacaattcataagagtcgatctttgttttatattctattcgtgccgtttttcagaattccttcttttttatataaaaaaatacccttatacatcatttaatttgtataagggttccgttctttatagggaatgttccgaaaaaaatacgcgtattcctttctcagctccgtaattgtcatggaattgagtatttctttcgtatagactccgatctgcagaagctttttggaataatggtttctctctttgtccaatgcattttgaagcaaacgactcatggcggcctcctttgttttccgttattctatgatcagaataacgcttttatatcaaagacgtataaagccattgtaaaacttctgtagattatgatgtttttcggtaaagtccgttctggacggctctgagcagcggaaaagcatgttctccggcaagctgcatgaacgcctccagcatttcgtcgcgtttcatatctaattcaatgatttcttttgccagcgaaaccgctttttctttctccattcctatccttcctcctcattgtgtctgtatagtacagcataaaacggggcacaggaccatgcattaaccttgtcaatttttctgccgctttttttctaaaattttctattccgcgtcagaaaacctgacaagcgtcaggttttttctctttttttcttatataatatgagtaaaagacatccaggggtgggaaaatgacgacagacgaacaatcttacaaagataaaaaagtaatctcgatcggcattgtaagcgaattaaccggattgtcagtcagacagatcagatactatgaagaacggaaattaatttatccgcagcgttcatcacggggaacgagaaagtattccttcgcggacgttgagcggctgatggatattgccaacaagcgggaagacggcgtgcagacggctgagattttaaaagacatgcgaaaaaaagaacaggctctcaaaaacgacccgcagctccgcaaaaaaatgctggaaggacagcttaatgctcattttaagtataaaaatcgctgatcaaaaaagtccgcctcctgtgagacggactttttttataaagcatgaagaaatgcagttgcaatgccgaaataaattaataaggacaaaatatcgttcagcgtcgtaatcagcgggcctgatgcaatcgccgggtcaatgttcaatttatgaagaataatagggacgatcgttccggccatcgtaccgataatcaacgttgcaagcagcgatgaaccgacgacaaaaccgagcgttaagtctttctgccagacggttgcgacaatcgtaatcgcgatcgcacagacgatgccgatatagataccggttcttaattcacggaaaatcagtttaaagatgttttttttattcatttcttctttagccagtcctctgatgacgacggcgagtgactgtgtgcctgtattacccgtcgttcccgcaatcatcggcatgaaaaatgcgagggcgacgactttttgcaatgtatcttcaaaataattcagaatgcttccggaaatcaatccgataaacaatagcagaatgagccacggcaaacggcggtacgccgcaacgtacgctttcgtatcaaatgtaatcgccttaccggaggctgcgaatttttcgtaatcttcatcggcttctttaatcacgacgtcaataatatcatcgacagtgacaataccgacaagcacatgattttcttccacgatcggaatggctaaaaagtcataccgctggatcagccgggcgacttcttcctggtcttggagcaccccggccgagatgacacgtgtaaacatgagatcctgcactttatcctcaggctcgccgagaattaaatctctgtaagaaagcactccgacaagctgcttgctgtcattaatcacgtacaaataatttattgattctgcgatttctgcaaagcttttcagcttcacaaccgcatcttttactgtataatgctgcggaatccagacgaagcggttcgtcatcatccggcccgccgattcttgcggatagttcatcaaaagctgtacggcctttgattcctcagcctccatgctggataatagctgttctttcagttcttcatccatctcttccagcaatgcggcgagatcgtcgttatccattttattcattgcgagagtggctttcgttttaccgactttatgcaaaacggcaagctgaaattcccgctccagctctccgatcatgtcggtgatgtcatcaaccgtcatatatgacagatagcgggcccggtgcttttccggcatttctttaaacaaaaatgccatgtcatagggctgaagctcatctatcatgtttcggaattcttttatttttccgtcccgcaataaaatgataatgcgtaatatgagttcgtcataggtcatgttttggaccatcgggactcgtacctcctttacggagacgcgccgtccgtcaagggaagtgcggcggtttgtctcctcatcatgtcgtcactggttatctggctgtatatgggtacttcttctgacatactcgaatggggagaatccatactccgcacctccttatcatgctcagtcgtgtacgttttgaggcataaaaaaaaccttctgatatgaaggcgaaaacaagcacggcaaataaacgtgcggggcctccaatcgtagagctttagcactgtatggcataggacagccatccagctgcgttaagaatcaccttatgtcgatgattcctgttgacccattggcgtctttggacatttttgggcagcagcgtatctccatacaggagcctcacctaacgaagttcttatttgagttgacacactgagattacagaaaaaaaaggaatgtgtcaaccttaaatttgtgatttcagcacatgcctataaaataaacggaataaaggcataaagcccttattccggcaaatcgctttcatcctcttctgaaaggaaatgataggattcatgcagcatgagcgcgtactccccttcttttgtcggatgcggtacatactcagcctcgttgatatactgctcttcccttttcttcatatgacagacctcctgttcaattttagattgtccaaaagaagacccgttatcataggaaaaaaatcacttgcggagcgggacaagcagctatatttttcggatcgtgaaaaagttcctaagcagccacgggcccggtttgaaaccgagcgttaattgccacgcgccgatcgcctgcagtccgaactcccgaacgagaaccattttttcactcatgctccgcacatcctcaaaccacacttcatgcgttcttccattttcatcagtataccggaagtaaggggaacgctcctgctgggaataacggatcactgattgatgcttcatggccgtttccatggcgcgctgattggagatggcggatccgatcgttcccggacggtacggaatcacccaatcatacccgtacagcggaacaccgagaatcacttttcttctcggcaccctgctgatggcaaaattgatcgtttgcctgacctctgtcaaaggcgccacgggtcccggctcactgccggcgtggtgccagtcgtacgccataatgaacatataatcgacgacggctccgattccgccgtaatcatatcccctcagccacggcactgcatcacttgtttttgccggaaccgatatcgttaacgcgagctgatgctccgaaagccgggtttttaactgccggagaaatcctgtgaagaggtccctgtcagcttctctgatccgttcaaaatcgatatttacaccgccgtatccctttcttacggttaaggagacgatattgttgacgagattcgttcttgccgtcggattttgcagcacttgatgggctaattccggactgaatcccccttctgtcagattcgtaatgacggcaagcgggcgcactctgttctgccatgtggtttctattgcggttctgtcgtttaaatcgttaatgatatctccattcgggccaaaatgatattcaaacaaagaaatcgccgaagaatacggcgcaaaatcattaattagctctctatccgcttcaggcgtccgaatgacataaaattgcagggttcccgcaagatagttagagatatcagggatcttcactttcatacccgcccgcagccggttcggcggaatatccgggtttgcctgcatcagctgcatctgcggcacataagccttacctgcgataacggcatacgtatcattcggctgaaccgtatattcattaagagggattaaaagcgcctgccccggaacgatattcgtttcctcaagcccgttgacacttctgatgctgtcaacagggaatccgtactttctgctgatggaaaataacgagtcaccagactgcactgtatgaacaaacatagatgtcctccgtttccttttgatcaaaagggctcttcttatctttatgaatgatcatccggtccgattccaaactctgttcggagaaaggctgtttacaaatcagacatgatcaactatgatgatgtcatcataaaaaactgtataggaaacgcactaggggtgctgttatcggctgagataaaacatgcggcaggcgtgttttgatcccttataacccgatctggataataccagcgtggggaagtgcagattgaccggagcgcaggttttttccccatgcgttttcgttctgctgctgcatattccctcggatatgcagttttttatttttcattaaaaaacgggggaggacaccgcaatatgaaactgaatataaaccgcctgtaaaatcatctctttcatacataccactatccgataagaaagcaggagatcacaatgaaaaattggaaaatgagagaaattgtcgtcatgtccgtcatcagtgttgtatttgctgtcatttatttagtatcaactcatgcaagcaatatagcggcagggtttttcggccggatgagctacgaaccgatttacggtatctggtttatcgtctcggtgattgccgcgtacattattcaaaaaccgggagcggctctcgtttctgaaatcatcgccgcgtttgtggagtgcttactcggaaatccgtcaggaccgatggtgattctgatcgggatcgcacagggaatcggtgcggaagcggtctttttagcgacacgctggcgggtgtataccctgcccgtgcttcttttatccggtatggggtcttctgtgacgagcttcatttatgacttgttcgtttccggatactctgttttgaatccgggtttattagccgtcatgcttctcatccgtctggtctcaggtgcgcttcttgccggccttctcggcaaagcaatcagtgatgcgctggcttacacaggagtgctgaacggcatggcgctcggaaaacaattcaagaagaaaaagaaacaggtgaaccaagatgcaggcatctgagccccttctatcggccggccgtcttaccttttcttatgatcaggatgaaaagccgattcttcaaaacgtgtcctttcagctccggaaaggagagagggctttattgctcgggccgagcggatgcggcaaaagctcgctcgctctctgtttaaacggtctgtacccggaagcatgcgatggggttcaatcgggaactgtttctttatacggaacacctctttcacatctgacagagcccgccgccagatccatcggcgtcgtgtttcaagatccggaccagcagttttgcatgctgacggttgaagatgaaatcgccttcggcctggaaaatttgcaatatacaaaagaagatatggacgcaatcatcgatgacgttttagaaaaattagagatcactcatctgaaaacgcgaacgatcgcttcgctgtcaggcggttcaaaacaaaaagtggcgcttgcctgtatcattgcgatggaaccggaactcattattttggacgaaccgacggcacagcttgatccatattccgcacgtgaattagtgcggctgatcaaagatcttcaagcaaaaaaaggcttcggccttctcgttatcgaacatcagcttgatcattgggcgccgtggatggacaggacgattgtccttgacgaaacgggtcagaaggtgatggacggagagacggacgttatctttgaaacaaagattgaagagctgatagagctcggcattccgattccgcgtgtgatctcattgcaggagcacgtcagcattccttttacattgtgtaaagaaaagctgtttcaagaatctgtaccgtctctgcccgaaccccggcccgccgcgctttcggcagaagacgcgctgagcgttcacgagctgtcattctcaagaggggcagacgtcatttttcaggatgtgagcttttccgtaaaaaaaggttcaatcaccgcgattgccggccctaacggaacaggaaaatccacgctcctttctgccgcggccaagctcatccgtccgctgggcggagacatcaaaatagacggcagaccgattgattcctattctgaaaaagagctgcggcggctgatcggatatgttttccaaaatcctgaacaccagtttgtcacagattccgtcattcaagagctgatgttcggttttgaaagcagcagagccgcaaaggagaaagctcttcagctgttaacccgattcggcctgagacgccatgcctcacagcatccgttttctttaagccaaggacaaaaacgccggctcagcgtcgcaacgatgcttatgcacaatgtgaacgttttgatgcttgatgaaccgactttcggacaggatgccaaaacggcgcgggagtgtatgcaaatgctccgtgagattcaaaaggaaggaacggctgttttgatggtgacacacgatatggaactcgtctcagattatgccgacacgatccttgtgctctgcggcacgaaactggtattccggggaactcccgacgctttattttctgataacaccgggatcgccgagcaggcgcatttggctttgccgctgcggtatgaatggatgaaacacgacaggaggcggagaaatgaacttgcggctggaggctgttaacccgtcaataaaggcggcggctgtattgttatgcgtcattatgctgtcgtttatttataatccgtacacccctgctttgttttatatcatcattgcgggaggcgtcctctcggcggggcgtgtgccgctgaaaaaatggctgctgttcacgattccgtttgtcattctggccttcggttctttatggacagccgcggtattcggaaacgtcccgacaaccggaagcaatctgctgtttaagctcgggccgattgccgtcaacagtgataacgcggcgctcgggatttctatcgcgtttcgtattttatgtttttccgctttgtcgatgatgtttcttttcacaaccgatccgattctgttcatgctcagtctgattcagcagtgtaagctgccgcccaagcttgcatacggcgttatcgcggggttccggtttctccctcttctgaaagatgaaatcctgatcatccggcaggcgcacagaatcaggggcgcggggtctgattccgggctgaaaggaaagctctccgccttcaggcgcttcaccattccgctattggcaggcgcaatcagaaaggcggaacgcacggcgatcgcgatggaatctaaaggctttacggggagccgaaaccgcacgttttacagaactgttaccgtgcgccgcgccgactggtgctttttcctgctcgtgcttctgttattcggcgcaagctggctcatttcattgttgtttgtataaaaacaggccgccggagtgattcggcagcctgttttgttatgtatgttattgatgataattgagagcctgagcgagattggacttgaccgtaatatctgagaaattaatgccgagctgtacggcggtttgagcgatttccggtctgattccggataaagtggacgtgacgccgatcaatttcagcgcctcaattaatttaaaaatctgatgcgccaccatcgtatcgacaaccactacacccgacaggtcaattaacagatgttcaatcagccgttttgcacatgtgctcagcgtattttcaagaatgaatttggcgcgctccgtgtcaatatcgccgacaagcggcagcagcgccgtccgtttgctcagcgtgataaccggcgagcttaactccaaaatcatttctctttgcgcattcagctgcatttttgagttatgctcggcatgatcgacaaacgtgtaaatcgtaaaatcaaatacttgtacaattaaattctcccatttctttctttccccctgtgcaaacgaagattcatgtttatcggcaaacgcattataataactgacgtatagtctccggtttctcatgaattcacggaccacatactggacgggagtatccagatgcttctggtctttcgcaagctcaatcacccaccgctcgaactcttctaaaaattctttttccggcatgatatacattttattaatatgccggtaaaattctttatcctgctccgtcagttcttctgtgatgacgggatttgtcaaagaataaatcgaattcggatccgaatcttccatcgtttcgatccactctttcgcaatttgatccacttgttctgaaaaatagctgtataatgcttcacttatcttcatatctcttctcctttcccatttccaattatagcgtcagcggatcatgaatgaaaataaaagctgttaaactatccatttatttgaaattttttagtgcgatagattacgccttttttatgaaaatgcttcaaatgactctttccggccggcatgctctgccataaaatagtagcaacacccttgtatccactcgcaagcataaaaaaggagggcttttttatgaatggtgaaatgcatttgattccttatgtcacggatgaacagatcatggaggtgaacgagcttccagagggtattaaagtgattaaggcgccagagttgtgggcaaaagggtttaaaggcaaggatattaaaatcgcggtgcttgacacaggctgcgacatcaatcatcctgatttgaaagaccggattgtcggcgggaaaaacttcaccgatgatgacgaaggcaaagaagacgcgatttccgattataacggacacgggacacacgtttccggaacgattgccgccaatgattcaaacggcggaatttcgggtgtcgcgccggaagcaagccttttaatcgttaaagttctcggcggtcaaaacggcagcggcaaatacgaatggatcattaacggcatcaactacgccgttgaacaaaaggccgatatcatttccatgtcactcggcgggccaagcgatgtgccagaattgaaagaagccgtcgcaaatgcggtaaaaagcggtgttctggtcgtttgcgcggcaggaaacgaaggcgacggagacgagcgtacagaggaactgtcgtatccggccgcttacaacgaagtgatcgcagtcggatcagtctcaatcgcccgtaaatcgtctgaattttcaaacgccaacaaagagattgacctggtggctccgggagaaaatattctctccacccttcccaaccataaatacgggaagctgacgggcacttcaatggccgccccgcatgtgagcggagcgcttgccttaataaaagggcttgaacaggacgcgtttcagcggacgctttctgagactgaagtctacgcccagctcgtgcggcggacccttcctttggacatcgccaaaacattggccgggaacggattcctgtatttagacgcgcctgaagtgctgatggaaagagccgaacaggcacagctgctgtctttctgatatttttctcatataatgattgatcagcttgtcacatcactaatttttaaaatgtgagattttctattgacagtgatctgaataagctgataagataaccaacaaatgatgtaacttttcaaaaaaattgaaatattttctcttatcgagagttgggcgagggattggccttttgaccccaacagcaaccgaccgtaattccattgtgaaatggggcgcgtgatttttgcgccgagacgaatgtctcataaggcacggtgctaattccatcagacgtgatctgagagataagagaggcttgcattttgaagttaaagcctctttctctcatgagaaagaggcttttttgttacatctcacttaaaggaggaaacttaatgacaacaatcaaaacttcgaacctcggttttccgagaatcggcttgaacagagaatggaaaaaagcgcttgaggcttattggaaaggtaaaactgataaagaaacgtttcttaaagagcttgacggtttattcttatcagctgtcaaaacacagcttgaccaacatatcgatatcgtgccggtctctgattttacccattatgaccatgtgcttgatacagccgtcagctttaactggattccgaaaagattccgcagcatcacggatcccgttgatacatactttgcgattgcccgcggtgtaaaagacgccgtttccagtgaaatgacgaaatggtttaataccaactaccattacatcgtccctgaatatgacgaaagcattgaattccgtctgacgagaaacaaacagcttgacgactaccgccggatcaaagaagaattcggagcggaaacaaaacctgtcatcgtcggtccgtatacatttgtcacgcttgcgaaaggatacgaagaatcagaagcgaaagcgattcaaaaacgccttgttcctctttatgtgcagctgctgaaagaacttgaagctgaaggcgtaaaatgggttcagatcgatgagccggcccttgtgacagcttcttctgaagacgtccgtgccgccaaagacctctatgaagcgatcacaaaagagctttcaggactgaatgttctcctgcagacatactttgattcggttgatgcatatgaagaactcgtttcttatcccgtacagggaatcgggcttgacttcgtgcatgataaaggcagaaaccttgagcagctgaagaagcacggcttcccgaaagataaagtgctggcagccggtgtggtcgacggccgcaacatttggaaaatcgatgttgaagaacgcctggatgcggctttggatatcctcagccacgctgatgttgaggagttatggattcagccttcaagcagccttctgcacgtgccggtggcgaaacaccctgacgagcatcttgaaaaggatttgctgaacggcctgtcatacgctaaagaaaaactggcggaactcggcgtcttaaaagaagggcttctgtccggcaaagcagccgtcagtgagcagatcgaagaatcaaaagcggcacttaaggctttaaaagcattcgcaacaggagcgaactcagctcaaaaagaagagctgaatcagctgacggaaaaagatttctcccgtccggcaagctttgaagaacgattggcgctgcagaatgaatcactcggtcttccccttctgccgacgacgacaatcggaagcttccctcaatctgcagaggtgcggagcgcacggcaaaaatggcggaaaaaagattggacggatgaacagtaccaagcctttattaatgcggaaacgaagcgctgggttgacattcaggaagaaatcggcttagacgtgctcgttcacggagaattcgagcggacggacatggtcgaatacttcggtgaaaaactggccggattcgcctttacgaaatatgcatgggtgcagtcttacggttcacgctgcgtacgtccgcctgtcattttcggagatgtcgaatttatcgaaccgatgacggtaaaagatacggtctacgcccaatcgctgacggaaaaacacatgaaaggcatgctgacgggacctgtcactatcttaaactggtcattcccgcgtgtggatatttcaagaaaagaaatcgccttccagatcgggcttgccctcagaaaagaagtaaaagcgcttgaagatgccggtattcagattatccaggtagatgaacccgcgctccgcgaaggactgccgttaaaaacgcaggattgggatgaatatttaacttgggccgcagaagcattccggttaacgacgtcttctgtgcaaaatgagacgcagattcatacgcatatgtgttacagcaactttgaagatatcgtagatacgatcaatgatcttgacgcggatgtcattacaatcgaacacagcagaagccacggaggatttttagaatacttgaaagaacatccttacgtgaaaggcctcggactcggtgtttacgacattcacagcccgcgtgtgccggcaactgaagaaatctatcaaattattgatgacgcgcttgaagtgtgtccgactgaccgcttctgggtaaacccggactgcggactgaaaacaagacagcaggaagaaaccgttgcggcattaaaaaatatggtcgacgccgcgaaacaggcacgaaaaaaacaagctcagcttgtataaaaaaagaacagccatccgcaaatcgcgggtggctgttttttctgggcgtgctatttattcttcagcgccttcgcaagttcacttagtgaatcatgctgcttaatttgatagccccgcccttctttttgcaaataccctttttggcagaattgcgtcagcacatgcaagagatgacggtaagatacacccaaataatcacagaccgttacgtgcttctctttataaaccccttcataagccgtctgcaaaataaaatcagccagccggtattcaagcgggaacgccagactttgtgaatatttcgaagccataagcgtcgccttagcacttagaaacttagccaactcacgcaggaatttcgcatcctgcagcaattgcgcgcggcagcggtaaataggcagagcaaaacaaacagtcttcgctgaggcttgaattccttttgtgtaatacacttcatgtaatagttccatctctccgatgtaatcatttttgttgataaaattaattaaagaaactttcccgttttgatgggttacatatattttcgcttttccttcaatcacgtaaaacaggaagtcagcctcctgccctcttgaataatccattcgtcccgctcatattcgcgcacttccataaactcttcagcggggaaagagaataaatgcgcgattgagtgtttttttaactgatgccgctttttctcgcctttataaatttccatcgtccaccccaaaaatatgagatatctcatattgtctttatgtctttacatgataacatgccaattaaaggaggaacgggaatgaaagcatatcgctggatgagtctgcatttttttagtttctttatgacatggggtgtttttctgccctattggacgggatggatggtgcatataaaaggggtttccgtatccgaagccagttttattatgagcctgggcttggcggcaagagggatttccacattatttttctttccttatttatcaggaaaattcagcagcaaagccttattaaacggcgccagaatcgggacgtttctcgcacttttatgttatattcccgctgattcttttcaaagcctgcttcttgtcacattagtgctgcatgtgttttatcctgctttaatgcctgctttagacagcgcttgcggcgtccttgtacagcataacgaattaaaggcctatgggacaagccggcagtgggggtccgcgggttttgtttcagccggcgtcatcctgtccgtctttacaggtatattcggagatcaagcgattttatgggcactgcttttaggcaccctgatattcgcatgcctcagctttatgcatgcgccagctgttctttcaaaacggccggaaacagacagcgcaagaaaagagggcatgtttgccttattccgcatcaaatatttcggtctggtgctcgcaatcgttatcttactgcaggcggcacatgcgtcttattacaattacggttatctctttttgcaggaaatcgatgcccccgcatatgccatcggaatcatcatcaacatcgccgttatcgcggagattatcttctttgcaatcgctgaccgatactttcatcaatttacggcaggctctttgctcgcgttggcggcgcttggtgctaccgtacgctggatactcgtatttgcctttccgcatgtcatcattttctgtattgcgcagacgctgcatgcctgttcattcgcgatgggacactatgcatttatgaaatacttaattaaaaatatttcacccgcgcaaatcccgaaagcccaaggcatatattcagcgcttgctctcagctggagcactgcggtatttactattttcggaggttttttatatgaaattgaaccccggtatgcctttatcggaatgattgtttgtacgatcccatccatgcttctcgcccttttatacagaaaacttgaaatgaaaaagagagtttttgcaggaaacgcacaagatatatagccatcgctttatagacgatcacatgtcccgctgtcattttgaccgatttgcgaatgctgtgcgatgtattttctctatatttaaagtatttccttcatatatgatgaaatcaaaaacagcggtataacccgctcaattggtttataaagggaatccattcagaaacttggacagaatccgtgaatatactgatacagtactgcttacgctcatttcggggaactttgttcgtaataaaatgattttcagccaactcataaggagggacattgtgtcacagcctaatttgcccaatatcacccctgtcgttacactttccagagacgataccattaaccttcttctttcgtcaattgctatggaagagctgggaatggcacatattctgaatgcggaaggtgaaaaaatccaatacgcgctcggagcgattcccggattaacagggcccccgtcaagtcttgcggatattcttaacctgaatgagagcgtccgggatacgcttgacagcttaatgaaacaggagcttcttctcggttcaaaattggacagtatctcaaatatccctacactggcggggccgacgggaccgacgggagcaatcggacctacgggggtcaccggtgcgggccttcaagggattgttgcttttaatccgctgattgcccccacttacacaaccggacaggttgtcttgtataacggaagctcttacgtcgcaaacgtaaacagcccggcgggaacccctggagcctcagctgactatacacttttagctgcggcgggaatcaccggcgctactggcggtaccggcccgaccggaagcaccggcgttactggcggcaccggcccgaccggaagcaccggaacaagtctgacagcaacttccggctatgcgagcaatacgggcggcggtgttgtcgcagttattgtcggcggcacgaccatttccttaccgaatgaacaaaacctttcggcagatattacggctaatgccgcaaataccatatttaccgttgctccggcgggacggtactatatttcctaccatattaatttaacggccggcttgcttgtaagttcgcgtattttaatcaacggcactcctcctgcaagttcgattatcgccccggtcgcgtctttggcaaactttaataactcctttattgtgactttgccagcaggcagcaccatccagcttcagctgttcggattattgggtgcggccacattgcttggaggaagcgtcggtgcagctttaaacattattcgattatcttaatggaacatgcaaaaaaaggatcaggcgtttgtccgctgatccttttttaattgagacagaagttctttcgcgggtttaaattgaggattgaacttcacggattttttggcgtaagcgatggccgtcatatcatggtttaatgcagcatggcatttcgccatataataaaaggctctgaaatcggcggcaccttttaaaatgaagtgatcagcgttttctccttcaacctgcgttccgttatcaaatgctttgattgccgctctgtacttttccaaatgatataatacaaggcctttataataatgaagattgctgtaatcaggatatagcttgagcactttttcaatcccttgttcggcttcttcataccgtttgagctcaagcaatattgtatatttcaaataatacaggagagacggaggcattcgtttttcgcttaaaaattgaaaaattgagccgttgacaagatgtaatgctttttcatagtctttgattctgtagcattcacttgccaaatgatagacaagccacggatcaggattttcctctgaaagctcttcatttaaaatgctgatattccgtttatgtttttgcttgatcttttcttcctgctccaagtagccgtagtgatgaatcacacatgggagcgtgaaaaaagcattgttttcttcctcattggaagccgagatattctcgtgaattctgccttgatacagaaggcctttatgattgcggaacagtctcggctgcatgctttcaaacgcttcgttttcatcgagctgcttccccgtataattgatgattttcaaaaggccccggctcggtaatccgtcatgaagcagcgaagttaaaaaacggcccgtctcctgatcgagctcttcatccgcgtcaagcactaaaatccaatctccttcggcatgctgcagggcgtaatttctggcctttgcgaaatcattctcccattcgaaatcaaacactcttgcctgaaagcttttgcatatatcttttgtattatcttgtgatccggtgtctgcgatgacgatctcatcaacgatgtcttgtacacttgataaacaacgggagatgtatctctcctcgtttttcacaatcatgcaaagagtcagtttacattcagcatttccgctcattttctcacctttcccgattttggagttgttgattgaaccaaggccgttcaggagtgccgttcatcgtgatgatgacaggccgcacccatctgacggcaggttcggcagtttccgtattccattcctgaagctgcctgacagcccgcttcgtaatcggatgcgcccggaattcgcgcgggctgtcagaaatgaattttttcgttcgttccgtaactgtcttcatttcaagaaagtgccgctcatacatctgcttctgctcttcttccaagctgatcattaaaaacagacggccgcctgtttccatctgccagcggcacaaagcggagaacagcctgatttcttctttgtaatttgaaccccttcttttatccacggtcacagataatatatgtaacagcgcaatcgtgagacaatgcatggcttcaaaagatgcctgtttcgcttttgagatgcttgaatacggcatatgcttcacccgtctctttttttatgaacgctccccgccttttttcttccaaccgcagtcctcacaatccccgcactcacagcagccaatgcgcccgtaaaacaggccgtcacacggatcttccggatcactgggatcgtctggattccacgggtcatcaggatcgcccggatcactcggattacttgggtcgtccggattccacgggtcatcaggatcgtctggatcactcggattacttgggtcgtccggattccacgggtcatcaggatcgcccggttcactcggattgctcgggtcgtccggatccatacagacttcagaatcctgtaagaagataatgtcctcaagcttcgtctgcaaaaggagttgtgatttcatgacggtgcgcaggagccgttcagtgcttctattgattgatgacaattcctccaaggagggatcgccggaagcgccgagaaacatttgaatcctttccgcttccgcctgcagaatatgggatagtccgatttcttccatagccacggatgaaagaaggaggttcagggtctcacatctggagagtgtaatgtcgggggtgatgttcggtatgtttggaagagacatcgatttctccctcttttctcttggtgtcattatgcaaaagtgctatatcgtattcttattccgggagagaagagatcattactgatgttttcgttaataaaatatcccggatataaaatccgggatattcgttcggttatttattttaattcaagtttgacgtctacatttcctcttgttgcttttgaatacggacagaactcgtgagcggcgtgcacaagcttctccgccgtttctttgtcaagatcttttgtatcaatgacgagcgttacgccgattttgtaacctccgtcactctcatcttttaaaaggctgacctgtccttcaatttcagaggtcatgtcgattttttgtttttgggcggcgagctcaagcgctcccccgaagcaggcagcatatcctgccgcaaagagctgttcagggtttgtgccggtttctccgtctttttttgcattcggcatgatgatgtcaaaatccagcaccccgtcttcggatttaatatgtcctgctcgtccgccgactgcggtcgcttttgcagtaaataatgccattattatcagcctcctcattgtacttactgtatatattgcccctgctcatatttttaaacatgattggaataggaaatgggccgtttttcggctacaataggggtaacgttaacaaacaaagagttggtgaaagaagtaatggcagaaaaagattttgaacatatgaaactggagaatcagctttgttttttgctgtacgcaagctcaagggaaatgacgaaacggtacaaaccgctgcttgataagctcaacgtaacttatccccaatatttggcgctgcttttattatgggagcacgaagaactgaatgtgaaacggatgggtgagcttttgtacctggattccggaacgctgacaccgatgctgaaacggatggagcagcacggaatcatcatgagaaagcggtcggctgaagacgagcgatccgtgacgatcaggctcacagatgaaggacgggccttgcagaaaacagcggcggatatccccattgccatgctggaacagacgggacggtcaaaagaggaattaaagcagttaaagcagtcgctttatgaggttttgaatacgctgcacggcaaaaaataaggatgccccgaatgggcatccttatttttattctgctgccagaagcttcacttcaatatttcccgctgtcgcttttgaatacggacagacaccgtgcgctttttggataagggcttcaagctcctgtttatcaatgccggatgctttgacctcaagcgtaacgcctagtttatatccttggtctgcttcatctttcagcagactgacatgcgcagtgacctctgtttcaatactcagacgctcttttctcgctacgagctgaagagcgctgtcaaagcaggctgaatatcctgcggcaaacagctgttcagggtttgtagcatgttcgagcttttttgctcttggcgttcccggcatggcaacatcaagattcagcactccgtcagaagacgtgactttcccttcacgtccgccggcggctgatacggttgcagtaaataatggttttgtcatgtgaattcacctctattatattgcgtacaatttaattttacacaatataatagagaccgtcaatctttccgcataaaaaaagcctaccctttttgaaggataagcttaaaagattatacgcggatttgtccgtttcctttgatgatgatttttgtagatgttaacgccggaagccccatcggccctctcgcgtgaagcttttgcgtgctgatgccgatttcggctccgtatccgaattcaaaaccgtccgtaaaccgggttgaagcattatgatacacggcggcggcgtcaacggcggtctggaagtaagccgcatgctcggcgttctccgtcagaatggcttctgaatggtttgtgccgtactgctgaatgtggcggaccgcctcctgtacgtcctgcaccgttttcacactgagaatcggcgccaggtactccgctccccaatcggcttcttctgcttgtttcgcttgaggctccagtccgcaaatcacctggtctcctcggagctccacccctttttctgtcagctgattcagcagctttcgtccgtgttcttcggcccatttttcatgaatcaaaagagattcaatcgcgttgcagaccgaaggacgctgtgttttggcattgatgacgacctcgcttgccatttgaggatctgctgactcatctatgtacacgtggcaattgcccgctccggtttctaaaacgggtacggttgattccctgaccacaagatcaattaaatttttaccgccgcgcgggatcaatacatccagcccgtcatttaatgtaaagagctgtttggcggtttctttgcttgtatcttctatgagctgaacggcatcaatcggaagctttgacagccccagagcgcgtttcatcacactgacaagcgctatgttgctgtggatggcggaagaacttcctctgagcacaaccgcgtttccggttttcaggcagagtgtggccgcgtctacggtaacgttcggtctggcctcatagatcatgcccactactccaaggggcacgcggattttttcaatggataatccattctctttttgaatggtctccagcgattcaccgacgggatcttcaagaccgatcagcagttccacggcgtccgcgatatcgagcaggcgtttttcatcaagagtcagcctgtcaataatgtcaggtgtcagtcctctgttccgtcccgcttcaatatctttctgattctctgttaaaatcagccggcgttcatttctgagtccgtctgcaatacattggagcgcttcgtttttttcagccgtcgttttcatgaccatttcggcagccgcttcttttgccaaggctgctttttgcaatacttcactcatttgtgttccccctcgtcaaataaattcacccaatcatctctgtgaatcacttccacctgcttcgttcctgaaagctggtcgctccgcttccctttggcttctaaaatttcatcggatgagtactgcgtctgccctttgccgatcatgccgccgggccctttgacttccactacggcccctttcggaaaactgccgcagacatcggcgacaccggccgggaggagacttgacccgttatggatcatcgcctgctccgctcccccatcaatgatgatttcccctgatatcggagaatgaaacatgatccattgccgtgtattattcactgaggacaggtctttatcgccgatataagtgccgtcgccttttccgtctaaaatcaccatcagtttttcccgtccggagccggttccgataaataccttcaccccgagcgacaatgcggtctgggcggcgagaagttttgacttcatacctccggtgccgacctttgagcctgctgatccggcatatccgagcaattctggtgtgatgtcattcagatagtcgaaccgctttgcgtccgggttttcattcggattggcatcgtacagcccgttaatgtctgtgagaatcattaattggtctgcatgaatcaaaccgcttacaagcgccgacagcatgtcgttatcaccgaacgtcagctcttcgactgatgtggaatcattctcattaataatcggcacgactccacgctccaacagttccattacagtggcataggcgtttctgtaccgctctctttttgagaaatcatttcttgttaataaaatttgtgccggcgtcagaccgtatctttttaaatggtccatatattgctgcattaaaagcgtctggccgactgcggcagctgcctgctttccttttatcgtaacaggtcgcgacggatagccgagagcggaaaaacccgctgccaccgcgcctgaggtaatgaggatcacttcatgcccgttttcttttaataaagaaatggcttccgtatgttccttgatttttgcttcatcaatacttccgttactgttggtgagcgagctgctcccgattttcacaacaattctttgttttttcatcgtttctcctccgtggcaatcaatccaaaccggctcccgtcaataaaaaaagcccattccgtcctgaaaaataaggacgaaatgggctttccgtggtaccaccttgtttgaacgcgtttttcacgcgtcccgctttcctgtaacgccaggttatcgcgcctgagttttcccctcaggactccaaggcaggttcggcaggtttcatgcggcaaaatgtttcagcgggccattttgctctctgtcacagaaagttctgcgtactgatcctcttcaacgctcaatgatttttttatattatgcaaagaaaacaggttcttgtcaagacattttcatccataaaaaacagtccgcctccccggcggaccgtcattaattaaatacgatcgttttgtttccgtgaacgatgacgcggtcttccagatgccattttacggctcttgccaacacgctccgctcaatcgttctgccgatattcttcagatcctctgcgtgatctctgtgatcgacgcgttcaatatcctgttcaataataggcccttcgtcaagatcgtccgtcacatagtgagaggtcgcgccgattaatttcactccgcgctcataagcccgtttatacggattagcgccgataaaggccggcagaaatgaatggtggatgttaataatccgattcggatgggcagatacaaaatcagacgtcaaaatctgcatgtagcgggcaagaacgatcacatcaatcttataccgctccagcagctcaagctggcgccgctccacttcggcgcggatgtctttgttagctttcatgtaatggaacggaatattcagcggttcgaccacttctttggcctcttcgtggttgctgatgacgaccgcaatttcggccatcatattgccgctttgccattcccaaatcagttcatgaaggcagtgcagctccttcgatacaaagatcgccacccgcttcagctcacttgccagagacaggctccatgtcatgccgaatgtctgggcgattgaggcgaacgcctgctgtaagtcctcttttttctcacgaatgcccttgcagtcgaattcgatcctaagaaaaaaccgtccgccttcagggtcagtcgtgtattgatttgattcaataatgtttgcgccatgttcaaacaaaaacgcggacacagccgatacaattcccggctgatcggggcagctgacaagcaggcgccctttttcctcattcccgcggcggtattctttcagccgctgtgtcatatatgaattcatctgttttaatccctcgtatcttcataattcgtaacttattatagattatactgaaaatttgataaaaatcaatttacgaaagaattttcagccctacggcagcgcataaaataagcgcaatgaaaaagatgcgcttcgcatccttctgctcgccgtagaaaagaatgccggctaatgcgccgcccgccgtgccgataccggtccagatcgcataggccgtgcccatcgcgatcgtctccatcgcataagaaagcagggaaaaagaagccgcaaatccggcgataatgaaaagaatccatttgactttcttttctttttgaaattgattcattaaaatgaccccgagcatttcacaaagacccgcggctatcaggctgatccaatgcattacgccttctcctccttcgtctcaggcttatcctgtgtgaccagctttaatccgatgacaccgatcagcaaaacgccgatcagcacgattttcaccggatcggcctgctctttgaaaagcaggatttcactgagcacggtgcccgctgtcccgagtccggtaaagaccgcatataccgttcctacgggcaggctgtctgtcgccttgattaatagataaaaactgatgatgattcccacaatcgtgccgctccacgccagtgccgaatcagcatgtttcaggccggtgacccataccacttcaaatacggccgctatgaccactaaaccccatttcatgttcttcaccctttctgtatccggacaatacaaaaaagcccggatagtcgtctcacatgagattgactctcccgggcttttttccctccgtgtgcatatgcgggatatgtccgcatatgtgttttctctcggaccaggccatgtatgaacatgcggaaccctagaaaacatgtctgctcgtatcatactacatttcgccgaaacgttcaacgtcagatgtgatgtcaaaaaccgtcagctgcctctcccatttggtaacggtctcaccgggcaccataccgattttttccgcgacacggacggaggcagcgttttccggatcaatcagcgccgctatgcgtccgtattgctgcgtatgaaaaccgtagtccagacaggcgttcgccgcctctgtcgcatagccgcagccccagcggcggcgggcaaacatatagccgatttccatcaaagtgtttccgtttaccgtctgcggaacgattccgcattgaccgagaaatgcgcccgtctctttatcctctgcgatccaaagactgacgccgtatcctgcggccaatcgtttgttccaggcaatccattccttcgtttcccgtctgcttttaagagaaggataatatttcatgacctctctgtcggtaaacagcccgtacaaattttcttcatcgtcatcccgcatagtccgcagacggatacgcccggttgtcaggatggtgccggaagacttatgtttcatcatgcacgccacgtctcctttccctgtaatagattatggatccggcaggaaaagtcctttctcagcataaaaaaaccgctttttaaaaaagcggtttgacgattaccaaggtttatttgttccgagcgcctcggccagggccttgctgtgttttaagcggttttttcgttctccggcgcgctgaacggccgtattgtgaagcatgatttcttcctcagtttccggcacgatccgcggaacgggtaccgatttcccgtttgaatcaagcgcgacaaaggtcagaaacgacgttgccgcaagctcgcgttcgcccgtcatcagatgttctttaatgactttgacaaacacctccatagacgatgtgccgacccatgtgacgtaagattcaaggcatacggaatcctgttggccgatggggcgcaaaaaatctacagaatccattgaggccgtgactgtttcacaccggcagtggcgtgccgcggaaattgaagcgatatcatcaatgtagctcatcagctttccgccaaacagcgtattgtgattattcgtatcaagcggaaaaaccctgcttgttttaacaacccttgtttctttgcaaaatcttgattctggcaacttcatattatttaaactcccctttggtgtctggtcgttttgactcattcatctgtaccctattaaacaatactttgaccgttttgtctaaaattttaaatattaagttggttagatattctctcataaatgttttattattcatcacatccgggaataataaacgcacattgaataccgataggaggatatcacatggacgtatccattcccaaatccacgcggaaaccggcttgccgcagtgagtttgatgctttgcagacagtcatcttatgccggccggaacacatggccatcaaggatattattaacggaacgcagaaacatttcaaacaagaaaatattaacatatccgttgccctcaaacagcatagtgagtttattgacattttaagatctcatcagattgaagtcgtcctgctgcctgccgatcccgcattgcctgagcaggtattcacccgggatatcggatttgtattaggcgagacggcgtttatttcaaacatggcggcttcagtccggcagggagaagaaaaagtgtttcaagacttgcttgacaataagaaaatcccttatacgcgactgaaaaaagcgaatattgaaggcggcgacatcttgatcgcagacggcaccgtttacgccggactgagcgagcgcacggataaagcggctgtccgggagctgcgggaggcgctgccggagatgacggttgtgccgattcctctcaaggaggatttcttacatttggactgtgtatttaatatgatctccgaaacggaggcgctatactgcaaaaatggcttgcggcagaaagaaattgatcttctcgccgaacgttttgagatgatagaagtgcctgaagaagagcaattcacgctcggtccgaatatcctgtcactcggcaatcagacaattatcagcctgccgcagcaccgtcatacgaaccgcgagctcagaaaaagaggttatacagtcattgaaaccgagttttccgaaattattaaatcaggcggttccttccgctgctgcaccttgccgcttgtcagaacatcttaaacatttacaaggcagtttccttcaagatacgttaatatagagaagacaagactctaaagggggaaaccgaatggctaagtacataggatacgcgggaacatatacaaaaggcggaagcgaaggcatttattgttttgaacttgatacagaagcgaaacggctcagccgtccgaagctggcagcaaagctcggcaacccgacatacgtcactccgaattctgataacagcatgctgtattccattgaaaaggcagacggaaaaggcggcgtcgcagcctatcagattcatcagaacagcggggaattaacttttgtgaatcaccagctgattgaaggcccgtctccatgccacgtcagcattgatgataaacatgaatatgtgttaaccgctaattaccacagcggaaaagtacacgcctttcccgtcaatgaagacggaagtctgcgggagccggctgccgaagccgctcatacgggaacaggtcctcatgaaagacaagagaaaccgcatacccatttcgcaggctatacacctgagcataactacattgcagccgtcgacttagggacggatacgctttatacttaccaaatgaaaaacggttcgctcacagaggtgaaaactcactctttcgcaccgggttcagggccgcgccacatcgttttccatccggcggaaaaatacgcctatgtcatgacggaaatcagtaatgaagtcatcgcgcttgaatacaacccgaccttaggtgaattcagagagctgcaggtcatttccgctttgcctgaaggctttacggacaaatcgcaaggcagcgcgatccgcatatctaaagacggcagatttctttatgccgccaaccgcggacatgacagcatcgccatctataagatcaaccaatattccggcgaattgtctcttattgaatgggtgccgacagaaggcaactggccgcgtgatttcgcgtttgacccttccgagacattccttgtcgcgtcaaacgaagaaacgggaaatctggttttatttgaacgcgacccggaaacgggcaaattgactctgcttcaatctgacattccggttccgtatccggtctgcgtgtcatttctgcatcaggtttaattaaaaaagaaagctgactttatattgtcagctttcttttttgtataaatggcaggcgacaaaacgccccgccttcacttcttcaagctcaggcgttatcttaccgcagagctccatcgcttcaggacaccgcgtcctgaatacacagccgctcggcgggttaagggggctcggcagctcccctttcagaataatccgttcacgcttgtcctcaagaagcggatcaggaatcgggattgaggataaaagcgccttcgtataagggtgaagcggttcccggtaaagcgcagcgctttctgtaatttccatcatgcggcccaaatacatcacgccgatccggtcgctgatatgcttgaccattgataaatcgtgagcgataaataaaaatgtcagccctttctctttctgaagcctttttaaaaggttgacgacctgagcctgtaccgacacatccagcgcggaaatcggctcatccgccacgataaattcgggatgcagagagagcgctctggcaatcccgattctctgcctctgtccgccgctgaattcgtggggataccggctgccgaaatccggatggagcccgacagcttcaagcagttcatccgccatcatcagacgggcttttcttgtattgtaaagattgtggatttccatcggctccataataatttcccttacggtcaggcgcggatttaacgaggcgtaagggtcttggaaaatcatctgcagcttgcggaagaagaccgaccgctgttctgccgcggcacggtgtatatccgtcccttcatatgataccgaaccggccgtcgggtcatacagacggagaataacccttccgagcgtcgatttaccgcatcccgattctccgacaagtccgaatgtttcccctcttttaatgtgaaagctgacaccgtcgactgcttttacggctttctttcttcctgcgtcaaaatgcattttcagcccgctgacttcaaggagcggagatgccgtcattttctattcccccttttcgcttatacagcggcgtacggtgcataattctttttcatagacggttccttccaaagacagcacttcgattgtttttcccgttttcggggagtgcagcattcggccgtctcccagcgccaaaccgacatggtggatcgcgccttttccttcttcataggcgaaaaacaaaaggtcagccggcaggatatcgtttaccgccgcgccgcatccggcttttgcttggtcctttgcatcacggggaagggtatagccgtttgctttaaatatcgaatacataaacccggaacagtcaaacccgaaaccgctcagtcctccccataaatacggaagcccgagaaacatcatgcccgtttcgatgacatcggccgcccgtccttccgtatgccggcactcgtctgcgtcagcttcatttacgaacctttctccgagcggcgtcaccacccggaaaaagcctttctcacgtcctgatgccggaagacgcgttaagaaacttacttccaagtccggttcgccgtttgtgtgatataaaatagctgtcggtttggtaatccatacggcgggggaagatgtatggaagccgtcttttgaaagctggctttttttcatccaccccggatatccgcgcacatccttgtttgaaggctggccgggaacggcgacaaaagcccattccccttcctctttgagaatgatcacttcttccccgaaaagcgcttgcgtttggacaaggttgtctgtgcataattgcagccgctcttcatatcccatagacgctaaccattttctgatctgcggcgggttttcgagcatcggcgcatcatccgaacggggagatgacggcagcgtccatacgttggctgccgccgctgtaacggctgctctcatcttttcgcctcctcttgtatcgacacaccggtaatgccgagacccggttcgtcgggaatcgtaatctgactgccgctgtatgtgatgccgccttgaatcaaatcatctttcagcataagcggcgcatcaaaatcaaacttcgtcacattccgtttgcccgcggcaaaatgggccgcggcggtgatgccgagcttggtctcaatcatgctgccgaccatgcattccacgccgcacgtttccgccatcgcattgattgtttccgcctgctttatgccgcccgctttcatcagcttaatattaattaaatcggcgcttctcgtctgcagcacgtgaaatgcctgacggggggtaaagacgctctcatccgccataatcggcgtgtctacggcatctgtgacctgcttcagcccggcgatatcgtctttgtgaacaggctgctcgaccagctcaatgccgaggcctgcgtcttccatctttcggatcgcagtcacggcttctttcggcatccagccttgattcgcgtccaatctcagtttgacgtttccgccgacacgtgatctgatcgcctgaatccgcgcaacatcgtccgatatgtcacctatgccgacttttacctttaaaatatgaaatcctttgttcacataacggtctgcatcccccgccatctcctcaggagaattgacgctgacggtaaaatctgtttccagtgtattccgatagccgccgagaagccggtaaagcggctgtccgtgcatttgcgcccatccgtcatatacagccatatccaccgcggcttttgcgctttgatttctttccaacagccggctgatatcaaacaaaacggcttccgtgccggaaaggctccgtcccaagagagccggcttcagcacatcgtggacggcgctttcaataccggccgcgctgtcgcctgtaatgacaaccgtcggcggcgcctccccccagccggtcagaccgttgtcaaaagtgagcttcacaatgaccgattcagcattgtaaaccgtgcgcaaagcggtcttaaacggctttttcagcggcacggacatccgtcccgtttgaatatctgtaatcctcacgcctgatcactcccttccggaaacccccgattcaatcgttaccgctttggccgccgtatccataaccgcgcgggctccgatcggaacggcgaagctcggtgaacaatggccgattttaaagcctttgagcgcgggcttccctgatttgacaatgtaatcgttcagcacttgctctaaagtaagcgacttttctttatgcttcggttcgcattggtgaaaatcacagaccaggattccggctgcgtctgacagttttccggccatctttaattgattcagcattctgtcgatttgatacggctcctcatcaatatcctcgataaacagcaatttgtcttttgtatcaatttcaaacggcgtgccgagtgtggacgtaatgagcgacaagttgccgcccgcaagctctccctcggcccttccgcctgtcagcacctctaagggagaaatgtcctccgtataggtaaattccgtttctgtaaaaagctgatgatacgacgcttttgtcaggggatcagcattttcaagcccgacatctgtgctcagcatcggaccgtgaaatgtgacgagccccgtattttgatgaatggcggtatgtaaaaacgtgatatcactgtatccccagaaaattttcggattgcggcggattaatccgaaatcgatgtcggcggcaatacggccagtgccgaatcctccgcacgcgcatatcaccgctttgacattctgatcactaaacatgtcatggagatcatcgagacgcgcccggtcttctcccgccaaatagccgtgacgggccttcagcgcccggccgagtttcacttgaaggccaagctcattctctaaaaacagcagcgcggtttgcagcgtcccgctctcaggcgggcttgcgggcgcaatcacaccgaccgtgtcgcctttttgcagtgctttcggtttatggttcatgactttttcaatctcctttccggattgaaaagtgaaacacgccgctcctttaacggcaaaagaacggcgtatgtttccgctgtaagatcaggacttttccgcccacttcagatcaatgtaaccgacggggtgccggacaatgcccttcacgccgctgttctgcagatgcacctgattgtaaaagtaaatcggaatgatcggagcctcgttcatgagcagtttttccgctttatgcatgagcgcaaaacgttttttggcatcggcttcctgttttgcctgcttgatgtagccgtcgtatgccgcgctgccccagccggtgcggttcatggaattatccgtctggaaagcctctagaaaactgatcggatctgcgtaatccggtaaaaatgagctttgagagaactggaacttcagtcctttctgctcttctaaaaagacgttccattccatattggcgagcttaacgtctataccgagcacacttttgagcttctgctgaatcgcttccgctattttcttatgctccggttttgtgctgtatgtcaatgtaacggcgggcagcttgtcataatgctcttctgccatgcctttttccagcagttttttggcttctgattcatccggatttaataaactgccgcccgcttcgcggaaatctttcccgtcaggctgagtaaatcccggggatacaaaggcatgtgccgacttttcactgtttttggtcacataatccgtgatttctttctgatcaatcgctgccgcgaacgcttttctgatcttttcattttgaaacggctccattttcacgttaaaacgatagaaatagagtccggcctgatcccacgtgcggacattttttcctcccatcagctgctcgctcagctctgccggcacaaaggcggtatccaaatcccccgactggaacatctgataatcggtattccggtcactgaccatcgcccatgtgactttatccagtttcaccgtctttttatcccaatacgtctcgtttttgaccatcgtcatgctatcgtcatgcttccattccgtcagtttgaacggcccgttgccgacaaaggtttttgcttcagtaaaccatttcggatcagccttggcgaccttctcattaatcgggaaatacgccggattggacacgacgctcagaaaataatcctgcggtgccgccaatgtgacgacaagcgtttttttatcttttgccgtgactttcacgtcttcttgtttgccttttccgctgttaaattcttccccgcctttgatcatatagccgagaaaagcggaagatgcgcccgttttcggatcgagcatccgtttccaggcgtacacgaaatcttccgccgtaacgggatcgccatttgtccattcggcgttatcccggatattgaaggtatatgtcagcttatcagcggacaccttccagctttccgccatggccggttcgggcttattatcttttccgagcctcgtcaatccttccatgatgttattcagcggctgccaggaaacattattaaatccgatcggcggatcaagtgaggtcggctcattttcgttattgagccgcagcaccgtttcacccccctgttcttttgctttgccgggttctgtccccgcctgttcattggctgtacagcccatcagagcaaacgaaacaacagcaatcacaccgatcgcccatctctttttcatttcaatccccctttttcctctgctgccgtcagctgctgcttcagccgctctgcacggtgatcctgaagccagcagttgacgatatggcttttggatttcacggttgttgccgggtataccttttcacagacgatcatcctgtccgggcagcgggcggcaaacgggcagcccggcggcggatcgaataaatcaggcggcgtcccgtcaatcggcgacagctcactatcctccatatccagccgcggcactgaacgaagcagcccctttgtgtatggatgagccggacggtaaaaaatatcatgcctcgtgccgatttcggcgattttccccgcatacatgacggcgactctgtcggcggtctgagcgacgacgccgagatcgtgcgtgatcagaataatagacacgcctgtttttctttgaatcttcttaaataattcaaggatttgtgcttgaatcgtcacatcaagagccgttgtcggttcatcggcgatcataatttccggctcgcagatcagagccatcgcaatcacgatccgctgccgcatgcccccgcttaattggtgggggtactgcttcaggcgggatttcgagtccgggataccgaccagatccagcatggcgagaacttcggattcagcttgttttcttgtcatggcgcggtgttccaacagcgcttctgagagctgatcgcctatggtcaaagtcggattgagcgccgtcatcgggtcctgaaaaatcatagaaatatcgcgcccccggattccccgcatttcccgatccgacatttggcaaaggtttttctgtttaaattgtatgcttccggattcaatctttgccgaatgtttcggaagaagacccatcacggcttgtgacgtcacgctttttccgcagcccgattcaccgacgatcgcaaacgtttcacctttatataaatcgaagctgacgcctctgacggcttttacagtgcctccgtatgttgaaaaagtaacatgcagattttgaacggaaagaacttgctgcgccatttttcctacctcctcagtttcgggtctaacgcgtcctgcaagccgtctccaagtacgttaaacgcgtacatcgtcaaggaaatgaaaaaagcggggaaaaacagccgccaccaatggcctgataaaatcgccggcagcccgtcgtttgccatgactccccagcttgcaaacggcgcctgaatgccgagtccgagaaaacttaaaaatgattccgcaaaaatcgccgccggcaccgtaagcgtcatttggacaataatggctcccatcgtattcggcagcagatttttcttaatgatccgaaatgttttcgctccaaacgttttcgaagccaatacgtgttcatcatgcttcatcctcagcacctgccctctgacaatccgcgccatgccgacccatcccgtcacggtcaaagcgacgataatggaactgagccccggccccatcagcaccattaacaaaatgacaacgagcagatacggcaatccgtagagaacctcgatgattctcatcatggcgctgtctgtccggccccctttgtaaccggcgacgcctccgtagatgacgccgatcaaaaagtcgatcagcgccgccatcacaccgacaaataaagagatcctcgctccgtaccacgttcttgtaaacacgtcccggccaagttcatcggttccgaaccagtgtgaaaaagacggcggaagattctgctcggcgagcgtctgccttgtcacgctgtgcggtgatatcagcggaccgaacacagccgatagaaacaggcagcataatatcacaaggccggccatcgccaatttgttctttttaagccgccgccacgcatcctgactgtaagacaggctcggacgcttgaccgactcggtttcaccctttctttccgcgcccggctgaaaccagtcatcaggcacttctgtgtgttttaccgtttcttgcgggagattcatcaggatcaccctttcttatgaagttttatgcgcgggtctaacaggccgtatgccaaatcaaccagaaacagcaggacgatcagaatcacactgtaaaatacggtcgttcccatgatgaccgggtaatctcgctgattgatgctttctacgaaatatttgcccattcccggtatggcaaaaattttctcgatgacgaaactgcccgttaaaatacttgcggcaagtgtcccgagtactgtcacaacaggcataagagcatttttcaatgcgtgtttgatcacaattttgacgggagaaagcccctttgcttttgccgtgcggatgtaatcctgagtcagcacttcggccatgcttgatcttgtcagcctcgcgataatggccatgggaccgacggcaagcgcaacagtcggcaggaccatgtgaacgggactcgtccatgtagctgccggaaaccatttcagatgaaccgcaaattgctgaatcagcagcgtagccataataaaattcggaatggaaatcccgagcaccgcaaggctcatggccgcataatcgagaaagccgccgcgcctgagagcggccattatgccgagcgcgagtccggaaataacagcgagcatgatcgccgttatcccaagctcaaatgaaaccggaaacccgcgttcaagcatagcgtttacactgtctgacggttttttaattgaaggaccgaaatcaaaggtaagaatggattttagatagatggcgtattgagtgataagaggttcgttcagatggtagtaggattcgagatttcgctggaccgcttcgtttgtgccccgctcttcgttaaaaggcgagccgggtatcactttcatcatgacaaatgtcagagtggtgatgacgaggacggtcataatcatggcgataaaacgtttgataaaataccgcagcaatgccgttcacccctttaacagaatgttgttctcatggcgagttctgtcatgacgagcatggcctgataggcttccggcatgtcttttgcctgaaattgaacgattgtcgttcccgggatgatttctgtgcccggcattaaatgggcccattcagcctgtccgtagttggcaaattcaatgcctaatacaggtctttcaggcggagtcagcggtttgaccttatctttatttttgagcgcataggctgttttttccgtcaggagccgtccggctttttgaggggacaggcatttgaccgcagttcttgaaatggtttgtttgacggcggcagtcgtcacattcgggatcagctcctccgcttcttttgcggcgcaatcatctccggcagccatgatgaccgggacatcgtaaaatccggcgagataggcatttaaccccagttcaccgaccggcttatcatttatgtaaaagtggcggacgccgaatatcatgctgtgcgacataacgcccggcatcgacgctctcgcatgatagccgataaacatcacacccgaatacgattcatcaagcccctgcatcatggaaaacggcttgacatcccccgtaatcagctctgcctcagggtgaagtttttcagcgagcagattattcatctttgagtggctgtcattcacggtcacttccgtgcatccgttattaaacgcttctgcgatgcaccagtttgcttcttcggtcatcagaaccctgccgcgctcataattgtgcatgcgggaattgacaaatgtttcatcaggcagtccggaaatcccttccatatccacagatagatacagtttcatgtaatgcctccttttttacttaaaatttcgatattaaattatgaatattctaacaaattatattaaaaaaggatgaaacatgcaatataccattctgccattatgggaaaaaacaaacccttttcaccgggaaaagggtttgctgatagaaatagttacatactgtttttgcttatatgatgacgctgaaactgtctgaccgcacttctgtattcatgatcgggaatgacctgatgcctgatcggttcaggagcctgcggcgaaggctgttcagcagcctgcttacggacggcatgcggtttatgcgccagcttatgtcccatgccggtcgcattcatgacaaatgataaacacactaaaagcaagcttaagatgaaagcaataagaaacaaatcgctgtatgtccccatcagcaggtcatgcggtgattgtgtgccgcgcgcgccccgaagcgtgccggaagcatctcttttcgtaaaataccctattaaaacaggtgcgcccatataaatgaaaagcctcaaaaactgaactgccgtcatgcgtttcaccagttccggaagcggtccgcccaacgcggctcccatcagtccggctgccacaataagccctgtcccggccgccagcatcacgaaaagccccgcaaatagaataagcggtatatgatgatccgccgtcatccattggaaattcacgaacaccagtataacagagcctgttatgccgagcatgcccggaccgactttatcatatgctaatgcactgatgacagcggcgatggccacgcctcccaaaaggctcgcataaaggaatatcagttgagtttgtgacatatgatatgcggtctgaagctccccgtgaaatgcagaaagactgaccgctatggaaatactgcccgcagcgatcatgaaaacacccagaatcggctttggaatcagcataagtttaatcgaaatcagcgcatgttcgtttctgtactgcatgatcagcaagatgagaagaatggcgatgcttcctccaaatcccgccaatgtctgccatgatgaaaagccccatttcggcagatgaataaatgtataggcggtcagcacggctgatacacccgctaacagaaaaccgatgccgtcaaatggagatttttcagcatttttatgagcgtcatcctgcagccacatataactgaaaatgaggccgaaaaaagacagcaggccaaaaatgccgaacagccaatgccaatggccggcgcttgccgccgccgtgcctaaaacggtccccataataacggacccgtaaaatccgccgattaacacaaataatgcgtaattccggcgctcaatcggaaacgaaagcaccagcatcggaatcataatcatcagcatagtacccgccgcagctccctgtaaaaaacggcccgcggcgagcggataaatatcatttgtcacagcagcaaggagcgctccgatgacacccgcggccatcgaaatcatatagacaggccgggagccgaatctttttcttaaatacggccccgccggcacgaataaggcaaatgccatattaccgataataatcggatgaaaagagtcaaagttttccccgccgaccgtctgccggacaaggctttggacagccgaaagagcggtattcgacatcagccccggcccgaccgccaatacagcgagcagagaaataatccagtgatgtttttctttcatgtgacagctcctttctgactatttgacaaagtgaaaaagctaacagatctcccccattagcttgacagaattttcatatcttttcatgtgaaggattgaacataatatctcatttattatttcaaatccgatggaaattgtcaatataaagcgccgccgtccgatttcgtctttttcacaatttcccacaatcttttcattattatcccacactttttgtttaagatggagtcagtaataataggcaaatcatgctatgatgaaatagagaaacggagtgaacatgatggataactatcgtgatgaaaatcggacagaccaaaaagaacaggaagtccttttagtaaaagaaaacccgcagccggccggatattccgcgccggacgaggacaagaaaaaacgaagcttcggctggttcagaccgcttctcggcggagtgatcggcggagggctcgccctcggcatctatacatttacgccgcttggagaccatcagactcaagatacttccaatccggctcccgctcaggaaacgtcatcggtaaccgccaagcagacatcttctgaatcagacagcggcaaatcggctaacagctcatcggcaaattcaagcagcatttcgaatatggtggaagacatttcaccggcgatcgtcgggatcaccaatctgcagaagcagcaaagcagttccgatttattcggattcggatcaagctcagattcaaactctaattcgtcgggtgatgatgcggaaaccggatcgggttcaggcgttatttttaagaaagcaaacggcaaagcgtatatcattacgaataaccacgtggtcgaaggcgcctcttcccttaaagtgtcattatatgacggcaccgatgtaacagctaaactcgtcggcagcgactctctgacagacttggccgttttagaaatcagtgataaacacgtgacaaaaacggcaagcttcggcagctcatccgctctcagaacgggtgaatccgtcatcgccatcggtgatccgctcggaaaagacctttcccgcaccgtcacacaaggcatcgtgagcggcttaaacagaaccgtctcgatctctacgtcagccggtgagtcaagcatcaacgtcatccaaaccgatgccgccatcaatcccggaaacagcggcggaccgctcttgaatacagacggcaaaatcatcggcatcaacagcatgaaaataagcgaaagtgatgtagaaggcatcggctttgccatcccgagcaacgatgtaaaaccgatcgccgaagagcttctcacgaaaggacaggtggagcgcccttatatcggcgtgagcatgatcgacttggaacaagtgccgcaaaactatcaggaaggcacactcgggcttttcggcaaacagctgaataaaggcgtttatattcgcgaagtggcgcagggctcacctgcagccaaagccggattaaaagcagaagacatcattatcagcttaaaagggaaagaaaccggcacgggcagcgaactccgcaatattctctacaagaatacgaaagtcggcagcaccgttgacgtgaagattatcagagacggcaaggaaatgacgaaaaaaatgaaactgactcaaaaagaagaaacatcttcttaacaaaaatccaaggcagccgccttggattttttatatacagctgaaactttaggcctggatcagccgtatgacttagtgtacaaaggaggatacatacacatgaaacaaaccggacttttgctggtcgttaccggactgatcttgctgcagctgagcattagcttcctcagcaaaacgctgcttggggaatgacgctgggtgcaagcattttactgaacctttcgggaaccggactgatcatgcgctctctgcacacgcagaccggccgcagatgaatgaaaaaagccgcgggacattctgtcatcccgcggcctttatttctgacataaaagcaccctgtctggccggacagggtgtttcggttaagacatatgctggtcccgataaatcttttcgtttttcatgccatacgctttttgcacgatatagagcggacggtcttttgcttcgtcataaatccttccgatatattcgccgatcattccgagcattaatagaacgatgccgctgaataacagctgtatcacaatcaaagaggaccagcccgtaatggtgctgttcgtaaacagcttcatgtataaaacgataaacatataaagaaaacccgctccggacatgatcattcccgcatagcttgccgccttgagcggtttatgagagaacgttgtgatcccgtccatggaaagcttcagcatttttttaagcgggtatttcgtttcccccgcaagccgctcatcacgttcatattctacagcagtctgcttaaagccgacccagctgacgagtcctctgacaaaaggatttttttcttttaatcttttcatctcatcacagacttttctgtccagcaggcggaaatctccggtgtcgagcggaatatcaatatcagtcacgctccgcagcagccggtaaaacatagaggccgtctgtttcttgaaaaaggtttctccctttcgtttcgttctgacggcgtacaccacatcgtagccttctttccactgctcaatcatatcaaggattaattcaggagggtcctgcaaatcggcgtcaatgacggcgattgcattcccctctgcataatccatacccgccgtgatcgcgatctgatgtccgaagtttctggaaaaatcaataattttcactctcggatcaatcagactttgctctcttaaaatctcaatgctgcgatctttgcttccatcattgacaaagatcaattcataatgctcttttgtttgatccatgacttctttcaggcgctgataggttgtctgaatgacgagttcctcgttataaaccgggacgactattgaatattgaatatgtctgctcatgttttttcctcctattcatcagattgaagttcgtatagtgaagctgactgattcattccgcccggcccgccgctcattcggctgtttttacccgcggccttgctgctttttgtatcagccggatcactatttttcgttttctgatctgtgcttgattgccatttatctgaagatactttctttccgtttttctcaacccactgcacaatatcgttatttccgcctttgcccattccggatgttaagaagtattttactttcccttcttttacgagctttttaaattgagtcagcgtaatggccgggtcagacccgctgaatccgccgatcgccatgaccgcttttttcgttttaataatgtaaggcgccgccgtattggaatcggttgcagcaaatagatagtccgctccggcgttgtgtttctctaaatagttgatcagttttgtattgacagatgcgttatccattcccatgccttttccgcttgttgaagcgagctgagggcctgtttcaggcaatgagctgttgcctccgtacagaagcggtgtgctcgcccaataaatcggcatgaccatcaagacgagaagggctgcaagtgaaacataataacttagcggtttttggcgctgtttgaatacgaacagggcgattgctgccattgcgccgagaacgcctgctccgatgctccagcctgcgccgatttgatcattgtagtttctgaggataaacagctcaaatccggttgtcacaagaatagcggccggcaatagccaagttttccatcccgcctgcttgcggtacagatgaacgagtgcgacccatcccgcaccgacaagtgccgcgatcggaggcgccagcataatgagataataatggtggaaaaattccgccacactgaagaatccggcaatcggcacaagccacgctgcccaaaagatcgtttccttctgttctgctgataatcgtcttctttctctcgccccggcgatcaataaaccggccattccaaaaatcgcaaacggcaggagccagctgatctgatcagataattccgattggaaaaggcgcagcggaccaggagttcccgttccgaacattcctgaacctgattgcattttcgagccggtgcctgtaccgctttttcctccgccgccgggaccgcctccgccgcttggaggacctccttgaccgccgcttggcattttcccgttagatggaggtgccgtcatactgccgttttgtggtttgtctccgcttgctgaactgctgcttgaagactggccaggcggtttttgcatttgtgaagaaccatcggaagaagacatctctttcgatgcgtttccgtccggcccgccctggccgccgccggaactttgccctgtcagccgctgaatcccgttatatccgaaagccaattccaacacggagtttgtctggctgcttccgacatatggccgtttgccggcaggaatattgtcaacaatgagcggccatgacaatgaaacggctgctaaaacggctaacgcgcttaccaatgaaatgatttttttcttaatcgtggtgtttgccgcaatcatatagaacagcaagaaggccggcaaaatcatataagcctgaagcatttttgtgttaaagcctgctccgacgacaaaaaatgccgccaaaagccagatcagtctgccttttctgatcgctttaaagagaagccatgtggcgaacaagaggaaaaagaccagtaaagcatcgacattgttcgtccgcgcgaccgctactgcgatcggtgtacacgccatgacaaatgaggcgatgcgcgccgccgtttttccgaacgtcggctttattaataagtacatgaatagaactgaacctacacccgccaatgcctgaggcaggatgacgctccacccgtgcataccgaatatcagcgcgctgatcgtttgaatctggtatgtaacaggcggtttatctaccgtgataaacccggctgcgtcaaatgaagcgtaaaagaaattatgaaagctttgaagcatactcgttaccgctgcggtgtaataaggattcaccgtatcatcattccagatgttgtacatattcaagaatgcggaagcgagtaaaatgagaatgaagactgcgtctatctcgcgttttttcattttcacctgtgttttcactccttttgtttaactttgaacaagtgtaacaaccaaatgtgaaaaatttattaataaacaaagacaattattttgccgtttacaaataggtaaaaagaatgacaaaacaggtaaaaaagcaaaaaaaagatgcccccgtcaagccgggaggcatctgtcatgatttctgatttactgtatcggtttcagccgtgcttctatttcagaacggcggtgttcgagataaggcgggagcgcaaccgttttgcctagctcttcaggtttttcatcaaccataaatcccggaccgtccgttgacaattcaaacagaattccgttcggctcccggaagtacagcgctttgaaataataacgctctacaatgcctgagttgctgaaaccttctttcgtaatgatgcggtgccataaagcaagctcctcttcattctgaacgcggaaggccacatggtggacgctgcctttccccggacgctcgcgcggaagatcgtttctttcaatgagatggacttctgtacgcgcgcctccgtttccggattcgagcaccgtaaccgtgccccggtcttcatgcgtttctttcccgatttcagtgaagcccagcacatcggttaacacacgcagcgtcggttctgcatacgggacggtcaattcaacgggaccaagaccgcggaaagaatattcttccggtatgccgctttgcttcaccgcttcaccgatgtcttttcctttttcgtcagctgtcagcacaagccgctgtccttcatgatcccaaaaagcgagtgtctctctgcccgctattgtcatgatgccgccatgagcgacctgatgctcttcgaatcgttttttccaatattgcagcgcttgtgcatccgggacacgcaggccgattgaagaaatactgtttgttcccgcatgaaacggcgcaatccgcggaatttcgaaaaacgtcaattccgatcccggattggctgcttcatcaccgtaaaataagtgatacatcgtcggttcatcctggtttacggactttttcacaagcttcagtcccaggatgttccgataaaaatctaaatttttctgcgcatcagccgtcaatgctgatacatggtgtattccattaactttcattatgttatcctccagtcaattatctcgatttcgagatattttatatatacaatttatgttatccggatcgcaaagtcaacccatctgcttcacagacagtctgcagactgccgctccgcaaataacgaacctttgatattaaaaaactattaatgttcgtttttaaaacggtattttttccttctcaaaagcagaaacctttatcttttagggaaaacaacaaaatcagaaaatttattttattcgtgtttcagcaattagggtttacaatatggaaaatagttttttcagcatgacgattttacatctggagggataggatatgcagattgaagagaacggacttaaaaaagagatcggccttaccatcgccctctcacttgttatcggcaccatcatcggttccggcgtatttatgaaaccaggcgccgtgcttgcctactccggtgatgcgaaaaccgcgcttatcgcgtggctgttaggaggcattttgacgcttgccggcggcttgaccgttgcggaaatcggcactcagattccgaaaacgggcggactttatacatatctagaagaagtgtacggcgaattttggggctttttgtgcggatgggttcaaattatcatttacggccccgccattatcggagcaatcggcttgtatttcggctctttgatggcgcacttgttcaattgggattccggctggtctaaattgatcgggatttcagccgttttgtttttaagcatcattaacattatcggaacgaaatatggcggcatcgtccagggaattacgacggtcggcaaattgattccgattatctgcatgatcgtgttcggcctttggaaaggcgatcagcatattttcacagccgttacaagcagcatgtcggacatgaatttcggcgctgccatactggccaccttgtttgcttatgacggatggattctgcttgcggcactcggcggcgaaatgaaaaatccggaaaagctgctcccgagagcgatgacgggcggactgctggtcgtcaccgccatttatcttttcattaactttgcgctgctgcacattcttcctgcgaccgacatcgtcaaactcggtgaaaatgcgaccggcaccgctgccggaatgctgtttggcgacatcggaggaaaattgatcagcgtcggaatcatcgtcagcatcttcggctgtttaaacggaaagattctcgcttttccgcgtgtctcgtttgcgatggcggaacggaaacagctgccgtttgccggacagatttcgcgggtgcatccgacgttccgcaccccgtggattgccgtgtcatttcagatcgcgctggccattatttttatgatcgccagcaatcccgataagctgtctgaaatctctattttcatgatttatattttttacgtcatggcctttttcgccgtgtttatcctcagaaaaaaaagcggcggaaaaccgcgcgcctacagcgtgcctttgtatccgatcattcctgttttggccatcgcgggttcactgtttgtgctgatcagcacgatcattacagatacactgagctgcgcgctgtccctcttgatcggcctcgccgggctgccgctctatttttggctgaaaaacggcagaaaaaactgacaaaaacggttccttttacgggagccgttttttttctggcaaaatcacgtgcaaaagttgacagcaaattcacatcttttgttatactttttaagcaagatgtctgaattcgaagtatgttacgtttttttggcgaagtgggtaacataagaaaaacaggatgagacacgtttttacgaaaaaatcaagaggcgtttttttcgactttatctgttttttttcgacaaaaggctatataataatttgatgtgtgcattgtctcattcaaacaatggagggtttttaatgataaaaagaaaaaaagataagttctcactccttttaacagaaatcgcaaaaaacatagacgaaaccgcagaatattttgtcaactttaaagtgacgaaccagacgactttaaaggaatttgccgatacgttaaaagagtttgaaacaaaaggagataatcatgttcatgtcatgattaaagagctgaacaaagcttttatcactcccattgaacgtgaagacatccttgagctgacaaacagcctcgatgacgtgcttgacggaatcgaacatttttcagcaatgatggagattttctcgatcacttcttccgatgagcatatcgataagttcagcggatacatcagagagtgcgcgaaggaaattttaatcacgattgaactgcttgcagaaaaccgattgaaggacattcaccctcacgccattaaaattaaggaatacgagcacagctgtgataacctgcaccgtaaatcattaaaaaatctgttcggcacagaaaccgatccgattaaagtgattcagtaccgcgaaatttacgaaacgcttgaggaaattgccgactcttgccaaagcgttgccaataaccttgaaaccattattatgaaaaacgcgtaacgaggggttataatggatactctattacttttaacgatattaattgtcatatgcgctttggtatttgacttcattaacggatttcacgataccgcaaacgcaatcgccacctcagtttcgacaaaagcgctgaagccgcggcacgcaatcgtcatggccgccatcatgaactttctcggagcaatgacatttaccggtgtggcgaaaaccattacaaaggacattgtgaatccttatacattagacaatgggtcagttgtcattcttgcggctctactcgccgcaatcgcctggaacttgatcacatggtatttcggcattccgagcagctcttcacatgcgattatcggagcgatcgccggagcggccattgcagcgtcaggttttgcgacgcttaattataaagggttcattaaaattatcgaagcacttattttatcaccgatcatcgcctttgttctcggctttatcgtatattcgatcgtgaagctgatttttaaagacagcaatttggcgaaaacaaataaacgcttccgcagagtgcagattttgacggctgccattcagtcctatacacacggaacgaacgacgcgcaaaaagcgatgggtattattacgatggcgcttatgacggccaatttacataaaagtgatgccattcctttttgggtgcagctctcttgtgccctggcaatgggtctcggcacatccatcggcggctggaaaatcattaaaaccgtcggcggaaaaattatgaaaatccgtccggtaaacggcgtatctgccgacttaaccggcgcagccattattttcggggccacgtttattcatctccctgtcagcacgacgcacgtcatttcgtcttccattctcggtgtgggcgcttcccaccgcgtaaaaggcgtaaactggggaacggctaaacggatgctcattacatgggtcatcaccctgccgattgcaggtacactcggcgccatcgcctttttcatcctagatctctttttctgatgacatccgcttctttacagaagcggtttttttgtgacaggaaaatgatgtcatgacatagaatgaacatagcagaccatttttcaaattgtgagggatgctcatgcttttgttttttcagatcatggtgtggacgatggcggccgcactcattttatatgtgtacgcatcctggcggtatgaggcaaaggtaaaagaaaaaatgtttgccatccgtaaaacgtggtatttactatttgtactgggctccatggtctattggacatatgatcccgaatcgctctttgccgcatggagacaatatttgattgttgccgtctgctttgcccttattgatgcgtttatctttttgagcgcgtatatcaaaaagctcgccggcaatgaattagagacggatacgcgggaaattttagaagaaaataacgaaatgcttcactcctatcttgaaaaactgaaaacctatcaatatctgttgaaaaatgaaccgatccatgtatattatggaagtacagaagcttatgcggaaggcatcagcagactgctggccgcttatgccgaaaaaatgaatgtcacggcttccttgtgcgactattccgcacaatcggataaggaccgcttgacggagcatatgcctgatgcggcggacgttcagtcccgtcttaaccgtaaagacgtctactatgatcaaaaaggcaggcttgtgcttattccgtttacagtccagaaccgccattacgtgatcaaactcacgtcggaaaacctgttgacggaattcgattatttgcttttcacatcgctaacgagcatttatgatttaatgctgccaatagaagaggaaggtgacggttaaatggagcaggcatttcaaaacgggcagccggaacaaagagcgaaaccgttcaaaatgtttaaaaaacgttcaatgacaagtatcgcaagttaccaggtcagccctcataccgccagaattttcaaagaaaacgagcggctgattgacaagtataaacaaaaaaaagcttgattacactaaggacaggagacacggctcttgtccttattccttttttccatatctttcatataataaaaccaacaaagagatgcgacaggtgatgatgtgaagaaaattgtcaggcgcgtaaagtttgtggattacggacgcttcgggctttccgcttattcgctgaggatgcgggcgaggaatctcaggctattgaaccggttaaaaaagaaaaaaggctgaatcccgcaatgtgaacgggactcagcctttttttgttaaagctgcatcagaattttcgcttttacagcgggaccgtagacgccatcagacgtcagtccgtttacagattggaagcgggccacggcatctgccgttttcggaccgtagataccgtcaatgccgttattgacagctcctttttcaggatagaagtaaagcgcggcgagcgcgttttgcacctggtataccttttcgccggacgtgtacggctctgtcagctgaatcacctcgtccggaagagaatacagtgcttcaaccggcgggctgacgatcagtacttgtccgactttaatcaggttcgggtcagcgatgttattccatttctgcagatcggccacgctgacgccgaatttccgcgcgatcgccgacagcgtatctcctttttggacggtatacgtctgtctttccccagaaccgattcccgctttaaactcatcccatgtatccaacagtcttctcggacaaagctttcctgaccaatgcttgtgcgcaacgacatttgcaagcgggatgccgtgcgaggtcattaatgtgcggatgagccattgggcgtttgccacggcctgtgaaaagttgccgtctgcgttttcacaaatttcaataccgatggatttacggttgccgtccccgtttccgtcaccggcatgccagccgttttcgttcagcggaagatgctgataaatttccgtatcatcgactgtgaaatgccagcttgtcggtgtatcgggatttttcacatagcttgcgtgacttttggcgttagctccgactgcggtattggctgtattgtgcaccgtaatgtaaatcggtgtcattgcatagcctggacggttattgtttcctgccgggataaaatcctgtgtgatttttaccatattctcatctctcctatttcgataaattgtttatttttaataaagcctgctgttttttcccttttgctgtaacgtaattgtttttaaaccaggcggcggcagtcgttatgattgtaaaaacggccgacccggcggcatacagcgtatctgcaagctggctgacctggtcctcctgaatattcagcggcgatttgccgaacatcagcaaagtttgattcaataaagcaagcaaaagaagcaccgtcctgacgaccgtgcctttgtccgcgaatttcatatcggtttcccccttacttttgcagcagattgtacatgatggcgatggctccgccaatgacgcccgtgcagattgctgtcacgatcgctcctgtaatggtccgcttaatccatgttgtgttttcgtcaattttgttcagtttttcattcagcgtcatgatttgctgatcctgccggtcggatacccgctctaatgcggccacccgctgttcaagcaccttttgttcacctttgatgcctgcgaattctttttgcaccgcttgttcatccagaagcacttcagctcccccctcttacattgttctcacctcccttcggaagcttcattcttacgaaaatgccgtgcctttgacagaaaggctcccgccggaaatgcttttgatttccatgacgatttccttaaagccggcaatatcaaatgaccacacttcttctgtgcctgacgtaccggcggctgatgtcccgtcatcagacttgattcctctgatcggcacgttttttcccgagatggatctcccccaaaaggcgacatggcccgactcagcggtgccggtgatttcgacgagaagttttttccaagcgcccgccgagaagatgcttccctcgcccgcctctgctgcattttcatgaaaaatcacatctgtatatgaaaacgccatgtcaccgcccgaaccgacagattggtataaaacaaattcggactgtttttgatttccattttcaaaacggaaccgataatatctttttgtcaggctgacccaacccgaagcggtcagcactccgccttttactgcgacagaatgtgaagccgtccacgaattgttatcctcgctctcttcgataaaaagagttccgctgcggtccgaataagcccacccctgtgctctgtctattaagacggctcctaaacggtcttgtccgaattggctgtaaacttcaatcgcttctagcggcgtattggtaagaagctctgccattccggacaaatcagcaacaggtgtgacataatcgtttttgttaccgcgataagcttttacggcgccgggcctgccaagttgatcggcgggaaattcaaatgaatgctttttcattggccgtcctccttttctcatttattaaaaacgacaaataaaaaaagccgtttggcttatgacacagcatttttataattttcgtatgtttcacccgttatttcttgaaattcctcaggcgtgatatacttcgcggccacaccttcagccagatcttcggcagagcagtcatcatagcccatagcctgttttaccatttctattgtggcccacttataaaacaaagcgtaaacccaaaagttaagtctcttcattttttcattctccttttacgtttaagagttccagttttaaagacgctatttgttcacctaaagttttattcaacatctctgttttctcccttgctaccacttcggcagacaattgtacacctaaagcattttgagcttgttctgcttgttttctcgctagtttttcatctgccagttgctgtccgatttctttcaactgttccacaatgggatccggctcccccacatcctgatacttgtttttttgattttccttatattcttgatcagcagattcgttccaaattttatttacttcatcaaactgcggcctccataagccgtccggaggttttatggttgttgagttttgcggcattatacttgatgtactgtctaagatttcaggcctttgaaaataaaaattctcatcatacaaaaagacttgcatattcatcccccattacaaagtgaaattattatctattgaaatccctgtaatattcccctctattttggcatatttcccgttaattctcagttctcccgttggttcggcataatattttgttatcccggttgttccaaagagtggggcagccattgatttctgtgttgaaggatgagcttcagaaggaagtacagcaaaaacgctgtcgaaatctgggggaaccacttcaccacgtgtgaatacttggttgccccacactgcatactgaggatttcttgcgccagccttatgcccattaattagtgttaaatcataccaggtcattttattaaattcttcttcagtaaatagacgtttccaccccttaaaaacaccgtctgtatgaacagtcgcgatccatacattattatcgtaacttctccaagccaaaatcgactttctacctgactcactctcaatcacatcatagttaaacaaggaattatcattttcaaccggattgtttttcagctgagcacccattccataataaaaccccgagctcagtgccagtatgtctgatccgctttctaagcgtgtccgtttcccatcatcctttgtcaatttcgccaactggccgccgttccatttgtctctttcgataggacttatatgaattgatgaatctatcgcatgtgcatcgacctttgactgcgctccagctatggattcaattggataccaattgattgctgtttgattagtgttataataaaaccaccatgcattacccttcacgtctacagcataaccattacctattcccggctgccccactaactgcatacctcggagactcgtatttgacgggttgtctgttactgcattggttccgtaaaaagttacagaaccaacatcttttaacgagtcataaaacgagccggaagttaaattgattttttgcgtgccgttatcagcggtgattttaaacagctgccctgcattccatgtatccttttcagctttcgttacatggatatcagtctgatttgtgtgggcatcgacttttttttgggcgccttccgaagtttctaactgaacccaatcagaccagccggaagctttaagggtttttctccatgtgcctccttcataatccattgccagagcctcaccataagacttgaatccgatatataagcctctggtggaaagcggaggagtatgaactcccgtgttatttgtgtaaaagaaaaaagattgattaagctggtctacaatttgatgaaaatccaagccatcttgtatacttattaaatatttccctgaatcatccgtcagctttgttaattgcccgttattccacttctggcgctcttccttcgtcacatgccggtccagatcttgattgtgccggtcaaaatctttctttgctgcctgctggacattgtctacgtttccgaggccgatttgcgcctttgtcgttttgtgcgggttgttcatgtcgtttttatgggccgccagatccgtgtgtgcgtcatttatgcctttttcccagcggttgacgtcatcttcgttaatcggatcgtccggaagccagtctgttttttcttcgtaagccatcgttacaccacctcaaaggtaaatcttaaatcaagcgttctgttattgctgagatctaaatttgtttttcgttctgtaatgacgcttcctgtttcgtcaagcatctgcacggtttcaatgtgtttgacgtcttcttccctgcgtgtgagaacggtgactgcggcttcttttacggaaatgtccgcaatcggagcttcttttccgtttaacagcacttttgtgatcctgtttttcagatcggctgcggcacgctgtctgtaagcggctgatatcatggtaagaccacctcgttattgttgagtgtgacggaataaccgaccttcagttcactgacttttcggtatctccgattgttgagaatgacacggtctttgatttccagtgtttcgtttaatgcagctctcagtgtatacgccaaatgagcgggtttgattttttcaagcgtttcaatcagctcgttcatgtgctgcaggtcatcaagcccgatatcggcataaaaacgatactgccccggaaacatccgaacgtaagctgacggatgttttaaaaaacggtttagcgcctgctcgatcgcttgatgtgtgatgggcggaatattcgacatctttgaaatcagcctgagccgtctcatatcctccgtgtcacctgattcccgcggtatttttaatattttttcccagcgttcaagcccccacgtcgccgtcgtgataaagagctgatctgtcaaatcgaaaatatcgttattctgccgctcaaactcgggagcttccgcctcaagcagttgtgccatttcctttaatcgggttaaaaacggcgggaggtacgccgtcatctcatcgagtctgctcaaggattgtcacctctttgagtttaggaatttccacgtcactgagcacgaggttttccgccgcaccgttcattttgatatcggcatagtcactgacggatgccgagttataaacgatgttgttaatttgtgataaacggacggtgttttcttcgaaggccattttcttaaataaattcaggacgcctttttcaatctccgctttcacgtcatcgatcgagctgttcagctcaggcagcacggaagcggagatttcgatttctttccatacggcgctttccaccgttactgccgctccgatcggcgcctgtccttctccctgcccttcgtccggatcaatataatcctttactttcttgatcagaatatctgatgccggttccaaattcgcatttgtgatgacaaccttcaccgttccggctccgttccaaagcgggaagattttcgccctgccgacgccgtccacctcttcggcccattgtttatagtgctgtttatttgcgctgactgcttcccggcggacacgggtaaaatagcgcgcccttaagctgttgtcatcttcttcctcacggccgggaattaatatatcgcgcacgactgctttctcaagcccgggtatcgtatcaagcggcagcaggttctgccctgaaatgccggcattgcccgcttcaccggctgtttcacattcaagcgttccatcccccgtatattgaaaatacaggttatcaacgaagaaacgagagcctggcggaatggtgatgcccgctgtgaattctccggctctgaccgcttttgtggcaggtgttcgttcaattcccgcttcagcagcccgcctgtccagaaattctccctgagccgtatcggaaaacacgagctccagcacggtatcaagccaaatataagactttgcgagctcagcggccgcaggcgcgagcgcattgtaaatgacgctgccttctctcgtatcaatatctgccgtaatgcgcgtcagcattctgtccataatgtcgtcaaacgtctgagcttcaaacatcctcacccagcacctcctctatctcaagcatgccctcatcagtttcaacggtaaaagagacggtgaaggcatcatcttttttctcaatctcaaaattggtaacagccaaaatacggtcatcatacagcaaggcttcttctatcagtcttggaatctccatttttttataagcatccgtcgtgttctgatctgaaagcacttcctgcagttcatttccgatatcatggctgaaaaccgaatatgaataccgttctgtgtgaagagcgatatagacgaattgtctgattgcgtccagtccgtttatcagttcattggtaatccggttgttttcaaaatcaattcggtaggtttgtgaagtttcaatggcctcactcgcatcctccaaatcttcaaattcgatttccggtgtcagggccattgcacccgctccttttagatttgatcatgtaaaaaagccctcttcggatgatgaagcggctttaataggctgatattctcttacatttccgtccgaacgccggttaaattttgtccagtacaaagaaagactgccctcctgttaaagcggcggtcatcacccgatctcccgcctggagctgatcatcttctccggatctcagccgcttcggcacaatgagtgcatcagacggaatcaaaagtttgtcgtgatctttcagtttcagctcaagcggcgaaacggaggtcacttcggccggcatcagctccaccggcgcttcggcgtcaaccgctccgacggctaaatgtttaatggcatcacttaatctcatcaggatgtcccctccggaagtgaatttttctccgtgacgtcaatcgtcatggtatgttttgttccttggaattcatggcggtccgtatctacataataggttttcttcagcccgatttccggaattgagatatagaccggcaatccgctttccaaccccgggataccgatggcctgtatatttttcagctctttcttaacgccttttttctcagcctgcttcacttttgcgcgctgtttcagctgggcttcgttaatgtcgtcagaaaccgtttcggtatactgcaaaacgccgaatgttttcatgcccgcgctgtctgacgcggaagcctttatcgttttattgtctttttgcagccgcatgacgacacgggttgcggtgtcatcaattgaggtgctgtattgataccctgtgatattaactcctgtttccagcacccatatgtcagacggctccggccattcacgcaagccgagcctgcctttttctgaatagagctgataattgcgccccgtctggctttttgtctgctttaacgcttttagcatcatatcgtaaagacttgtatcatttttaaaaacgagtgatttaatggtatggcctgtgttggcaatggatgtgacgggaatttgaaaatcactggcgatcctttttaatatttgatcggcgcgcttgttggaaaacacgtaaacgtcctggtttttcacaaggtattgaagcatatcgtatgcggtgaaggcgacggtatgctcatcgggcgttcttgcaaaaacaacgccgcggaacagctcttttccgttccatttgaacaaaaccgtatccccttctgatacgccgtaatacgtctggctgccctgctttacgacaatcgtcgcttcgatggagcggggcgcctgatatctgtgtccttccagcgttacgctttctgtgacaagctcgagccactccgtttcttttatgacaaatagttcaatcatcttttcacccgtttcattgcggtatcttcagcttctgccccgggaagatccaatgccccggctgccggatattccgtttgctgcgcttaatcatggcggttttattcgcgttccagattttccgccactccgtgtgttttccgtaaaacttgccggcgatgtcccaaagcgtatccccttttttgacggtatatgttttgggtgaggctttggacgggcgcttcgctttcgtttttttcttttgtttgatttttcttggcgaagcggttttatattcttttagtacgatatcaaaattccggtcgccgatttcattgtcaccttcgctgtaattaaagctttcaatgctgcatgtgacattgatttttgttcctgtaatcaaaaactgaacgggttttttcgctttcatccatgcttcaatggctgaaatggctttttccggcgaagggatgctttgatattcggcaatcgggctgtaccgtttcggaaaaaaagaagagaacgaaatttctttcgctcccggttcttcgataaacgtcacctctccaagtccggtgactttcacggaatcattctgcacgctgtttgcgatatcaatcgcttcagggagaacgggaagccggagcttgtccttcccctgagacagccaaaattcgtaaacagatttagtcaaaagcaacggccccctttgctccggtataaatgtctttttgcagttcatcaatcagcgcctgtttgattttggcggcgaggctgtcggcgtcctgtccgttatggaaatgctgatcgccgctgaattcgattttaatttcttttgttcccgttttttgaacggtttgtccgccgcctttaacggctgcggaaaccgtgccggctgaaagtgccgccggttccgtctgggacggatcggacacttccatgccgagcgcctgagcggctttttgcagcagataacggccgcggatgccccgctcttcagggatgatccactcccgtttgttcccttcgccgacacgggcgatctgctccttggtaatcagacccccattggcataaccgacgtaagggcctccgtgagccatacttttaatcccggggacattgctgatcgagccgtatcggcttttaatatagccgatagcggcagcggcgttgtgaattggatttctgatatcattcatgcccggcgctttgtgatcttcaaaggtgctcggaatcgtctgcataagcccctgtgacgggtgtccggctttggcgttgctgtcccatagattaatggaattagggttgccgcctgactcatgctgtgcgatcgtcattaatcccggaagccagctgatcggcgtattggttgctttcattgcggccaaaagccactctttgacgcttcctcccgctgcacccatgccggaaaaggctgctgcaagcgagcctgcctgtttttcggcgtatttttttacgtcaactgagccgagacctttgacgacgccgactgaagcaaagcgcccgaggctcatcatgacacgggaaggagaatgaatatcaagctcttctctgaatgcgtcctcgacttttttcgccatatctttggccgcctgtttgacttcgctcccttttgcagtcatccctgatacgaagtgtccgatcaggcctgacccccagccgttcgcggaatctcttgattgcacaaacggtttattgatatgtgtgcttacgtattgcgacgttcccgtatcttttgcattctgtccggccgaatatcctttcaccgttgcggcgccccatgatgacgattgattaaccgccgattgataaggtgttttcacctttgtttttaaaaatgaatcggtgcccgtcggcgaagtattctgacctttcgcatagcccgcaacgacttgctttccgtaaccggatgaagacgaaatgagggcattgaacggcgttccgatgtttttttccttccagccgtccatatccaccgcttttttgctgattccgctgtcaaagccttcagtaaactgtttgccgagtgatgaagccgtcccgccaagtccggatgtctctacagacgctgcggccgatacagatgcagaagaagaaacaccgcccgctcccgccggaacagcagaagactgagccgaagccgcgcccatatcatcgacaacacgcatgccgagcttagacgcagcttgtgaaagcagcatctttccgcgtccgcgattgttgtcgacgggaatgacaaattccttaccggcttcaccgatccaggaaatggtcggctttgtaatgtagccgcctgtggcgtttttgtccgtttttttctttttatctccgccgcctcctgtgacaaagttcattatgcctgaaatcattttgccgccggttttatcccaaatctttttcacccagtcgaatgctgcagaaaaagcatctgatatggccgttcccacttttacaagaggttcttttatatgtttctcaaaccagccgcttaaccctttccatatattctttaccgtatctaaagcagtcttgaaagcatctgatattcctttaccgacatttttcaccatgtctttcaccggattccagacagtatccatgaaccagccggaaaccgtactgaaaacggatttaattttatcccaagctcctgtgattttactccaaatggacgtcgccactccgacgacagccgattttacggggccccacaccgtgctcataaaccagccggatactgtgctgaagacaccttgaatcgtcgtccacgcattcacgatatttgaccagatgctggttgccactccgacgacagccgatgaaaccggcgtccatacattttccatgaaccaggatgacaccgtgctgaaaatcccttgaatcgtcgtccacgcattcacgatatttgaccagatgcttgtcgccactccgacgacagccgatgaaaccggcgtccatacattttccatgaaccaggatgaaacgcttccccaagtatcttgtattgttgtccaagcactttgcgccgctttggaaatatcattccacgtgtctttcaaagctcctgaatcaaaggcctctcccaagctggaaccgcctaaactgccggcgatgccgcctaccgcgccgccgattaatgtgcccactccgggaacaacgctgccgattgccgctccggccgcggctccggcaagaccgccgcctgctgagccgaccttctctcctgcattatctttattgatgccggctaaatcagtaagtgataacaattcacctatgccgggaattcctttagcggcaccttttaaccctttcataccgccttttagcgcctttgaatctcccaagcctttcaaaagcgcgccgatgcctttacctgccccttttgttttcggcgtgtttacggatgcctgtttgctttcctttacggaggaacctcttttcgaggatttatttcgcccttcgactttactgcttttgcccctcgtcactccggtacagcagcagcagccccccaaagccccgccggtttttttggctgactttcctgaagattttggcgctgttaccgtgcgctgtgaaccctttgtcagatctggacgcttcgggccgttggagccgccggcagtaaggccgcccttactcttttcttttttcgtgccgcctcctaataatccgccgatattgagtttgcctaatttttcagcgattcctgaaaatattttttctattaattccccggctttttcgatgattttgtccgggctgaatttctcaaatttcttggcaatcttgctgacaattttatcaacaaatgcctcagcattttcgatgatcgcatcaggactgaatttgccgaactttttatcaatgcctccgaacagtgaggatgtaaactgctccactttttccaaaatcttatccggattgagaaaatcgaatttctcagaaattcggtcaatcgtgtcatttacaaattgttcggcgcggtcgattagcttatcaggactgaatttaccgacaacgtcgtcgactttcttcataaacgaatcagtaaaatgatccagctctttcaatatggtctccggactgaatttgctgacaacgtcatctatctttttcataaatgaatcagtgaatttatccagttctttcaatatggtcttcggactgaatttactcacaaccccgtctacctttttcataaatgaatcagcgaatttgtccagctctgctaaaagtgtctccgggctgaatttgcttgcgatctcatccacttttcccatgaatgaggttgtgaacttatccagttcggttaatatcgttgccggactgaatttgctcgcgatttcgtctacttttcccatgaatgaggtcgtgaacttgtccagctctgctaaaatcgtctccgggctgaatttgcttgcgatctcgtccacttttcccatgaatgacgttgtgaacttatccagttcggttaatatcgttgccgggctgaatttgctcgcgatttcgtctacttttcccatgaatgatgttgtgaacttatccagctctgctaaaatcgtctccgggctgaatttgcttgcgatctcgtccacttttcccatgaatgacgttgtgaacttatccagctctgccaaaatcgtctccgggctgaatttgcttgcgatctcgtccacttttcccataaatgacgttgtgaacttatccagttcggttaaaatcgttgccggactgaatttgctcgcgatttcgtctacttttcccatgaatgaggtcgtgaacttgtccagttcggctaatatcgtctccggactgaatttgctcgcgatttcgtctacttttcccatgaatgatgttgtgaacttgtccagctctgccaaaatcgttgccgggctgaatttgctcgcgatttcgtccacttttcccatgaatgacgttgtgaacttgtccagctctgctaaaatcgttgccgggctgaatttgcttgcgatttcgtccgctttcttcataaagcttgcagcaaatttatccagttccgctatgattgtttccggataaaatttggatgcgatgtcattgacttttttcatgaaggtgtctgcaatggagtcaagcattgaaaaatcgtatttcggcgaagcaggagcagcagatgcagaagcttttccgacgtccggcatattcttttgcattgcagccagctgtgctgtcaccttttcgtttaacgataattgaataacattgttttttcccgtcagcgaatcaatgcccgctgaaattcggccgactgttttcatgacgtgatctatgacgcgtatagtgacagagtacccgttctttaacgcagattgcatatagcgtttgatacgttccatggcaggggtcacttcgtctgacgcatacagtgaaacggtaaatcctttaaaaccggcagccagatcccgcaatctctcaaatgccgctgtcgcgctgtcttttgctcctattttaatggttaaagacgcaggcagacccgctaattgggcttgcaccttttgaatgacggcactggctccgtcttcagctgaaatagagatcatttgtgcgcccagctttcttttcatagagcgctggatgcggtcaattgttcttaaaacagatttactctctttgcgtatatcaatttcactttggcgttttgtcattttcctgtatttctcaagcgctctgaagccattttggattttccttattttctttgaaacccgatcttccaattcaaaacgggcggtcagctttgccatgatgtcgctccccctttcttcgcttgtttttcaagaatgtccagcttgtaaccgattaaaccgtacaacagcgccttaaaatgtctcggtgcttcatataactctttcagttctgatggagaataatgaagctcatgcatcgcgtaatagagatacacggcttccttattcccatcttttatcagttttttgcttcttgctccagatcttctaattcatcttcaaaaccgttgatctcaatcgctttattcagccaatttgcatactcaccgccgactgaaagcacgcgttttgccacctcgaccggatctgccgttttgtaagcgtcgcggagctccttagaccggaaatcagggtaaatcgtagattcaaccgcgatccgcgcataaaagcgctggctgtctaagtcttttactcggcctctgcccttcacatttttatatgtcgtgctttccttctccagttcatcaatgcgctcagtcgtaatggctttaaaaataaaaggcacgatgtttccttttttatcgacaaaacgctttgaaagcggaacccgaatctcctcagcctcgactgttttacccggcataaagaatgacagatcatatacttgttcgtttttttcgctcatgatgaaaactcccttactcttttttttataaaaaacaggcctgtaaaaaggcctgtttcactcataccgatcttaattaaaacgtttcagaaagcttttccggcacatcgaaatcttcaaaagtaaacggcacttcttcttcgagtgcttctgagtctacgtccagtccggcgatttttgcagaatcaaagttgacgtcatacagagtgacgcgttctgttccgcggcccgatgatttgtcatcaagaacggcttgcagcgtaaaatacgggtcgctgccttttttgacgtaatccatcataagaacggcgaatttggatgtgaccttatagaatgttgccgtgcccgttccgttggcgcctgttgttttatgtcccgtcatgcggcggcccatgatgtttacttctgatttgtttttttccacgtttgcttcaaacgttttaatatgcgccatctcttctccgtcgagaaataaacggccttcttttcctgaaatcgtgttttgcgcttttaatgccatcttagtttacctccacgttaaagtagaatttttctgccgcatccacaggctgtacggcgagatcaattaaaaagccgtcgcggtcttcattcagcccgattgtaatgtctttgtctgaatcaaagttggcgatgccgcccgcatcctgaagcgtagtcaaatattgaatgatcatcgttttaacgaattgaagaccgtcatttgtcgcaggaagatcgctgcccgtgccttttttcgatttaattaaggctttcagttcacgtgtcaaatcgttattcaccgcatcaagcacacggacgattttgtttttcgcgaactttttgtttttctctgccgtaaatgtcaccaatgagttgatatctttttcaacgctgactgacttatcacgggcatcataagagaaaaggaattcacctttggaaagacgttcgatcacttcatcatgagtcaggcggtgtagcacatcgacggcgccttcgtattcaacgaatgttaaggattgattaaatgcggcgctggcacttgcgcctgccacccaggcggtcgcatcttcagctttaatctcggttccgtcttccagcagcacaccttcagtcacattgataatgccttcataatcgccgctgtaatgggcggtcaccccttgcactttctgtccctgcgcatcgcgaaggcgtttaatgaatgcggcaaatgtcgctttcagctgatcgttttccgcgacaggaagagcgatgacatcgaaattctccgtttcagccgcagctaaaaaatccgtatagtctgagttgaccggtgctttatcagttccgcccgcgagacggatgcctgcctgcgggtttaacgtttccccggattcttcctcagtgcctgtcagcgggatggaagccgacagttcgcccgttcccgtaaatgtgacatagccgtttgcttttaattcttcggcttttttcaccgtttgtttgtcaacttccgcttcatccatgtaagtggtcacatcgaaagcggtctgatcaaggacgttttcactgatgcggatgatgatgtcatttccttttgaaccgccgtacaaagcggttgctttaacaccttgcgaaagatcggcactcgctctgattccctctgtcagacggtacatcaaaacggtttttgctttctttttcgcctcacgaagcagaatcagtgacggatcttcaatactgagccccacttttttattcaaatcttcaatgcttgaaatggaaacgaatgttttcgcttccccccagccggatgcgacgggaagggcgacaatcccgcgttcaccgatcgatacccgctcctgggcggttgttttaaagttaaaatagattccggcacgttctttttcttttccttgcgtaaatgttccgccgttcattattgcatgacctccttggttaaaaatgcttcaatgtaagacttggcttgcgcttttgtcatttgtttttgcttcacgccgaataaagccccctggagaatctcaggttttacgccgaaaagctccttcgcgtgctttgttaaatccgccgtgtcataaagaaccgctcgttccgccgctgcggcatttttctttttatgttgtttcacttttctttcaccccgctgttaatgtccacatcccgcagtgcgggagatgtttgtttctgatagtagtagcggctcgtccagcggattgtgatcactgcctcgcctttgtctccgactcttgtttcgatacggctgatgcggacgaaatcaccggtatcctcccctgattccgtaagcagcggaatcagctgtcttgattctctcaccgcatcggcgatccggtcggctgcatagagcgcctgcaccgagtcggcatggaacagcttcacattcagactgtacgttttcttataagtggagactgtatcattttcgtcaaaaacaaatgggggcggaatgtatagtgacggcacctgaaattgttcaggcagttcattttcatatacgggcacgccgcactgctgatacaaaaaagcggcgattgaaccggtttcgcgattcatccgatatctccccccaacgtgttaagccactgattgaaacgcttgtccagcgattcggcgaagagtgtttcatacaaaagaagggctttgtcccaaaacccattcccgctgatccactgttttttgagcgccattcccgttgaagctgacggatcatagatgaaccgggagccttgaaaatacccgggcacccatctgacattttcatctgagacggtccaatgtccgtcatttatgaatgaggcatactctacattggtgccgatttcaagggtcagtcccccgttttcaatgatccatacatgatcctgcgctccttttcggaaagaagacagcaggttttctgtttcaattcctcccgaatgaataagctcctcccttaccatgtcgagaaaatcctcccctgactgttccagccatccgcctgcctgacgggcaaattctccggatgatgccttttgcagcgaccgattccattgttcaaggttttttatgctcatagtctgtcatctctcacagcgataacctcccaatggtgctgtcttgctttcttcggcatttccagaatatacgcctgtccttcccaaatgattttgtcattgacacgcacagcggcctctttcggaaaatgaacgagaaaccgctgatataccttatgatcaggcgcaagctgaataagctgctgctgtttttcaacaaacagacacggcatgtcttcagcgtcgggcacttccggataagaaaagacaggctggagcttttcggcgggaatcccgaagcgtccggccttcggaactgacaccgtctcatgataaatatcgcatctgtcagtgagcagccgttcgtagctcataaaggtctcacctttgcgtttgcagaaaccggggaataacccggcgtgatatattcacagagaagatggcgcaccgccggttttcggattccgccttcacctgccaccgtatacgagtagtcgcctatcttttcagattgataggcggaagcggctgcttcattctggttgatcagcgcaaaatattgagaaagctttaataacgcaagcttaatcttttcgggaagcggtgagtaaatagggtcagtgaacgaatgccccgccattcttgccgcttccgcctccgcctccagaatgtcctgtataagaagcggctccggcctgtttttgacttgatcataaactgaatatgaaacaacgtcagacggctgaattaacataactgccacccccgtcttattctttaacgtttacgattttggcgcttgcatcttcttcttcaaatttgctgtcaagtttagccgtcagtacgataataaatttgcggctgcggatatctttatctacttcgattcggatattccgtgaaaaaccgagaatgatattttttgggtgagtcaaaatgatgtcagacgcatcgtattgggagtcaccttctccgaccgagtacggctgcagattggacactcctttgaccggaacgccgaatgctgaagacaaaccgccctgcaccgcaagatcccccaggttggtctgacggtcagccacacggtctttccattcaatctccatgccttgagatgtgtaaaatctgaattcctgaggcaggcgcaaatattttgccggaatggcttttaagccttttttaaatgtggctctggacagctcttccccgtttccgtcaatgacgtgagatacagtctgcttacggattccgtcaagctgtgccaagtacggatcagaagaagatgtatcgccgtttacgacaagctcctcaatatcgactgccgcccgctccgccaaaatctgcatgatcgtctgctgcaggccgtctttttctatattgttttcaagcgtgtcataggtgatattaatttccgcaatgacttctttcgtattcagctgcaccgtacttgttgccgggacggtcagctgatcgtcagttaaggcttttccttcctcagcggcacgcagaatccgctggccgaaaccgattttttcaaatttctgcgagtcattttccatttgaatcacacgcgattcgctgaaaatggtcggcgtgttctgcaccatgcggataaatgctgaagcttgtgcggggttcattaaaccgccgctttttaaagcggaaagtgacatttccgcctttctgatgatatcttgatttctcactctacagttcctccttctgactgggcttaaagcagtccgctccaaatggattttttaacaggctcttggccgcccgtctcttcttccggctgctttgatgcgcctcttactttttcaagcgcttcaatgcgtttaataatcggcgcgagcatgtcctcaacaagcgttttcagcttttcttcatcagacggcgcagccgccccgtctttgtcttccgtgttttggtccaaactgtcaagccgctttaaaagcgggtgcagcgcgtgttcaatcgattctcttacgtcttcttttctcatcttgttcaagtcctctcccttgcggtttcttgatttgcggtcacggtcgagaaattgcttgaccgcgccgaataagccggcttgcttttctgccggctcttcgtaaacgtcagcggttcccgccatgctgtagcccgtaatgataccggctttaatctgatcccatacttcatcggaagctttggtgacaagcacccaagatcctttccggatcacagcattcccgatttcaaagtcatccggggcgacgtacgactccaccacctcgccggtcccgccttcaaaattatgatttgtatcgatgttgcgggcgtccgccaaaaaaccgtgagcggccttttcaatctcttcagccgtcatataatcgccatgggcatccgggacatccggctcgtaaacgatgccgtaaacaagcttctgctcatccgattcgttttttgtaaacacctgcacctttttttcaaatgacggaaggcctccggctgattttgtaaaaaagaattccgtttggttcgccgccttatcgacatagctcacaaaactgatgacggcatttctcaattctctcggcacgagatgttttcaccccctttcaggattgctcctttttccctttcagcaccggccggctgtagtactcttcaggccattcctcaagcgtcttgccgagcactcttccggccagatcacggaggtcattaggagagaccgcgccggcggaaataaatggcgtaagcaccttcgcaatttcaagcggatcgcgaaaatcaggcccttttaatgtgagctgtacatcgtggagacccagttcaggcaaaaataacgtgttgagcttattaatcagcgttttccgctccggctgaaacacctgctcctccgttattttccgtgccgtatcggcggtggctttgttgtattcctgcgcctcgcccgtataaagcggcgggagacggaaagcggaacggagtttatttctgcttttgtcgtcatattcaagaaacagcgcatcatcctgcagaatttccgcaagtgatttaatttccacagacacgggcgtaatgtcttcgcctccgtgaaggtctttttccttcgcaatgccttccgcctcaatcagcagaaacttgtgggcgttttccaccccttccaggtcattcatataatcctggagctctttgtacgatgcttctgacagcatgccgttttcaaccgtaatggcggccggcacgtgacggccctgcttgaaatacataaaattcagttcttccgctttccgggcgccgtacagattgacgatattgccgacccagcgcggaattccgtaagtgccgctgccgatttttaagtgaatggcttcatttgcccggtattcttcagacagggtctttacgtattcgccggttctcatgtccatcatgcgggggtcgccgtattccttaaaaaacactttccgaccgttcagcatctgaacatatttacggaaccgtttttgccttttaatcgttttggatgcgccgttttcttcatatgaaaatgtgacttcaacaggatcagtcacaccgcacacgcgcatatgtttcacatccagatattcaatccccgccggttttcccgccccgtcccgaagcacttcgagaaaaccgttgcccgttttttcacggtcttctatcgcatatccgaggatcgtctcggccgattcatcaaaatgaagacatttgtaaaagctctccagcttcatccagtttttttcggctcgggccttttttgacggggagcaatccgggctatttacatcaaaggtatattccacatcaaacccaaaacccgtaatattgacccgatacgcgtcaatgcactgctgaagaatcgtcgagtattcggcgattgttttcagttcaatgagattatagggcggtgaaatgatgtcttcgccgtacagatcggcaaattgatcttcgttcatctgccttgcctgcggcgcggccatttttgatttaaagacggtggctctaacgttttgatagttcggcaacgcctacctcctcctttcccgattcggacgtctccgtttttgtgatgcatctttcaaatccgccgcgtcatagtcatccagcgcataccaaatggctgaaagtgtgtggggatcaattgaaaactcatcttccgacagaacgccgtttttgttttttgcgtacgttaagttctgcaattcgcggatcgtatgttgacagctgtctgagcaatagatgtgtttgaaccgtttcagtttttttgtatactgaagtcttgagcccggaaactttttggccgcaaccatgtaaaagccctgcctgcgaaaatattggatgcttttcggctcagccgaatccgctttgatcagctctttttgttccgccaattcctgaagctcctcagctgtctgatcatcggtcattttgtttttgtaatactcccagaaaatataaagctctttttgatccggatcgacggcaagccggatgaccgcattgtatgactcttcaaatccgaaatccatgccggtccgaaacagggggcgtctgatggaagcaatccgctccgttacttcgttgtgctccatgacctgaaactgcggaaacacgcggatgccattgacgccgaactgtcctttgcgggcgatccggtataaatcgggatcgtaatgccgtaaactgtccagctgcttaatatagcttttcggcaaaaacagattatcgcacgctgtggaatggtggtaatacgtatctcccttaacgacggtgcctttttcatacagcgtctgatcatccaatacgaaccgttttttttggtcatcacgaaaaaaatgccggtacgtccaattggaggtgccgacgggatttgtggtgcatatcatatgaagcgaaagctcgggatggcgcagacgcccgatcagctccttaaagccttcatacttcacttcagagcattcttcaatccaaatcagtgaaatatgatgaatggatttcaatttggccgggttgtccatccctttaaacataatccggcttccgtttgaaaatctcagctgcatcggtgaagacacggcctttacggcatgtcccagctcaagctccccgataatatcttcaaacaaggcaaaagtagaatctctgtgcgtatcgaaaacttcccgcacgacaagcgccgtccgcttttcacgaagcagcttcaggatgattttcagcgcggtatgatagctttttgacgagccgtagcctccgacgagaaattggtacgtttcattccaattgaacaaataatcttcaaagcgcgggttgaccgctttttcaatcatgaccgttcctctttccgcgtaatgacaatgtcaatcggcttttggctgtcttctgttttttccatcttctgctgtgccagctttaatttttcattttcgattttttgtttaaattgatcagggaaaaggtcaaagtacaaggacagcttttcaagagccttcatcttgtcggcaagcttgattgcaatgccctcttttccgagttttgcttctgtaacgatggttccgtccagaaggtgcgaatctttaacgtcaacgtagctgatttcctgcataatcggctgatcattttcgtcaaagagcggccctgattttccgaaggcctgaacctctttttttccgaaggttacataatcggtaatgtcggcgaaagcgattttcacatagacttgaagaacgtccatcgcttcgacaaacactttattaaccatttcctttttcatgcggctgatttctttggcgactttttcgttttttaacagcctgcttcccgtcacatgcgcgctttccggtgaatacccggcttttatcgcagattgggtggcgttaaagcttttcacataataaagacaaaacagccgctggcgttcgtttaactcatcaccttcgcccgggttgttttttccgccgctttccgcattcttatgaagcgcctcgtcccagcgcccttcttttttccatctgccgatcgttcttgcggatacgcctgatttgccggcaagggcgcgatttgtgatgcggcctttatgagactgatagattgtaaatgcctgttttctttttgcgtttttcatgctacggcatcaccgccacctccgacatgattgtctataataaaaagcggcttctaatcgggccgctttttgtgatcgtctgttcacttctaggtggcaaacgtatgacaacttatgaagcaggcgattgatttctttgttcctgctgtttttgaattttcagaagcgcccgtttgaccgtcgtctgtacggttgatttctttacgttcagcaaggcggcgatccgttcatatgaaaagcattccgctttgtggagcagcagcatttctttttctctatccgttaaaacggctaatgcgtcccgcagtctgattctgtcttcttcagtcacatttgcggaaggttcaaacatcagcgcctgcgaataggtttctatgattctaggatctttaatcagcattctctgataagcgtctcttcggtctatcgctcttcttatgccgggctgccggcctttttcaagccattcgatgacatattccacatctgtaatgatcgttctgatgatttttttatctttcagttcttctgaagtaagcaccgtttcatcggcttcctccagctgcttgtaccactttttcgtctctttcagcgtgcgtttatattcaaatagtaagtcttccatgcagatcctcctctttttcggaacaaaaaaaggacaccaaccaatgcgcagcatatacgcgattgatcagtgtccgcaggctttccgtcttggacgtattctgtttttttcgattaattcaatttaaagccgatttcatattcaacccgggccagatccccttttcgcgtttcgacaagcgttttgccgtgctccggcgcttcggcgagccatgcttccttcttcagtccgtctacaatgatgacccgcaccttgccttcttccagctggctttgtaatgttgtatgttcaatgtcagtcagttttttaggattcatgttttacgtcctccgtttttttcaggatgtttacttcatgtatgaggcttccgagctcatttatgaacgcttctttttcttcagaactttctccccggagcaggcggagagccgtttcggccgcctcaaaaagttccggggcttttgccatcaatgccgcgttgatctgctgagagtatgaacttaagttgaaaacggccgcgatgagccttccgtttgaataagggaacttctctttatccgcttcgctgtaagcggaataaatgtaaatgggtttttcttctccgctgtgtacggcccgccatggagcggggctgtgtttttcttgcaatggttatcctcactttccatcagcctcatgccatgcttcaatttgcttttctatccgtttcgccctgaacagcaggcaaaaaagccatttaatatatttatacacgtgcatcaagcctcgcttttgcgtcttgaaccattcgctcaagacgtttaatgaccggcgttaaatcagtgcctgttttgcagttcgggcaaggatgaaagacagcgccgaaacccgtttccgtcacaatgaccttcttcggcccgcacagcttacacattatctcgccccctctaatctgtggtttacgtcaaatgaattgccattaatgatgactaaataatcgctgcacatctcataaattcttgtgcccaaggcttcatcaacctgcaccagtccgtcacaggccagctcgctcgagattagaaccggcttatgatttaaatagcggtaattcacgacggcgtacatttgttcaatctgccaatcggtcgcccggggttttccgttcagcggtttgaacagatcgtcaataaaaagcacatccgcctgtttcatacggccaagctttgcatcaagcagatcaaaatcattttttaaatccgtaaagccctccacaaaaggaaaatacagcacgggtgtctgcatctgtctcatgacataattgctgagagcggtcaaaagatgggtttttcccgaccccggacgccctaaaagggcaatgctgtttttccggcagtttttaatcttgtcgaagttttcaacatattcaagggcgcactcatatgcgtcgacgactgcctgaggcttgccccgcgtgataaatcctttgaagtccagcttccgaaaggcgcctgtaatctcacttgcgctgaggatgcgctctgcttttcgttcggcggcgcagcggcacttaacccacacatccattcccagctggtttttgagataaccgccctgatctttacagagcggacagtcaaagcggctttcgtctgattcttccggtctgtccgccagtaatggacgttttccgtttttcaggtcggccagtatctgctcgatcgttcgttttgtcatgtatcgtattcctctctttttttgttgtgattgtccttcccgcaattcgtgcattcaagcggtcttccatatacttggcgcaatagctgaaagccttgatcgtttcagctgaagaggtgcgccgctgttcaaaagcggtaaagcattcgccgagccatttgattgcttcttgtgctgacgcaccgagggaaacaatacgggcgatggcctgataatcccggggcgacgggtatacgctccgcccctcctgtacagaccttaatctgataaaatgggcggcaatgtcgttaatcgcttcttcagcagtatgattttttgttatatctatttctctccggacatttttgtcccggtgatccgccgatattgtccggtcagttgcttctgggcgggtcaatgtctttttcggcgtgaatcttttcgagtgctttacggagacgatgagtccgtaaggggcgcggacggttttgatatattcatgctgttccaaaacctcaagccaccgtctgacggttttttcgctgacggcaaatacgtcggccatttcttttgcttttaagggcttatgaccgaggacgatcccccactttacgccgtcttttacgtgttcctttgtcgttgagctgatgaaccataaaaacagccaaatggcggatcctattttgtcataatgttctgaattcagtaatccggaatagatgaaaaatgggtagcttttacgactcataagggacgtctccgtttttcttcagacctatatagcgttcatactgcaatcggttatcaaatcggaataccggaagtccgcaagcggtaaaagatatcgaaccgcctgcttttcctaaacatctctggtcagccggattgctgctgaaacggatgattatcggcttcatctctcaccctcctgatcaatttcttatcgtattttgatacatttcgtatccttatgatgttgattatatacgatacttttcgtatcatcaagacctttttgatactttttttatcatctctttattttgatacattttgtatctataatcataagtaacttagggtgttgaaaaaagagaggtcattcggatgataggcggaagattaaagagtctcagaggaaagaaaacacaggaagaagtcgcaaatcatatcggtgtctcgcgcgccagatattctcattatgaaaacggccgatctgaacccgattacgacacgctgcaaaagcttgcggattatttcaaagtgtcgactgattatttgttaaccggaaaagaaccttcagatgaagacatgtttgccgatcccgacctgcagatcgcatatcgggacatgcaggacttttccccggaaagcaagcagcaggccattgaattcattaattatttaaaagaaaaagagaaaaaccgcaggccgaaacataaataatccgctcttttcctttaaattgcttaacgttcagccgatataaaagctgaatgtttatttttaaaagaaaagggaattgattcaaagtccgatcagggcttttctttctcgcttgaaaaagaacatatgttcgaaagggtgtattcaattgggcgattttttaacacatcttgaggaatacgtcaaaaacttatattgccgcatgggaatgaccgcccctctccatattgatatgcagatgattgccaaggagcttgacatttggattcattttgaagatacgcacagtatgatgctgaagcgggacggcatgtacagcatcgtcctgaatcaaagaaagtcacccgaagagcaatggcaggattttgcgcacgaactgtgccatgtgctgaagcataccggcaaccattttcatatgaacaagctgttcagggaactgcaggaatttcaggccaaccattttatgtaccacttctgtgtgccgacctttatgctgttaaacatggagcttccccaacggagaagccatgccgttattttaatcgcagccgctttccgggtgacggcatcatttgcggaaaaaagactcgagctgtttgaacggcgtaaagcaggtattcaatttcagaagcggctcgcttgtctgttatccgacaagcggccgaatgtgtattatgaaagcggacagacacacttgcatgccgctgaagaaaaaacgccgtattttattgaaaattagcgattctccgccggcagagtgtcagcattttgacatcggaggaagagtattgtgaagccacattggcgctggtttaagatgaggcgcagatgcgaacgcgaccggggccgaaatatatctgaactcgccccgtccgtcaaaggcttcaccgcgggcccatcttccttgtgaactctcatctcctctggaaaagttaaacaggtcatacgacacttcctgcttttcgagttcacgcggaaacgtcacaggtacaacaatgtcccgttctctttcttccagctcttttatcgccgcataccacatattttgatgatacgtatctcttgcaattaaaaaggacagcatatccctgacacccggatcgtcagtcatcgcatacagccgggtcacctgaagacgtccctgggattccgcatttaaatttgcccgaaaatctgcaagtaaattcccgctggaaataatgtatttcgcattccaagggtatccttcagcgtcagccgccattgcgcctaaacctgcaacaatggcgtgctgcggattcatcccccccataacagccgcgacggccgggtcacttttataggcgttttcctgcacatcagccggcgcatcgtccaagagccttgaaatcatcgtcgcaagcatttccacatgcccgatctcttccgttccgacatcatgcagcaaatctctatatttttcatcggcacggcagttaaagccttgaaacaaatattgcatcatgacgctgatctcaccgtactgccctccaagcacttcttgaagctttttcgcgtaagccggatcaggacaagacggctttgcgcggtattgaagctctttaatatgataaaacatactcattcccccattctttcaaacaatcttagtgtatgaaagaatgggcaggcggtgcgagtccgtttcttcactcataaaaaccggccttcacggcttctacataccgaaaaaacagatcggttggcgtatatttttctccccggcagccaaaattgctgaacagcgcgtgtctctgcaccgtgctcacttccaattgcagccccattttcctttttgtccgattgacaatgttgccgggatttacacctgccagccgatcattcttctctgtcagctcggcatcaaatcccgcttcacgcagcagatcacaaatcagtcttgctttttccagatccgcgcccccgacgagtgtatttgcctttttcagatcatgatacccatgaaaagccaatccgtaatgatgggcggtcactttttctaaagccaggggttcgtcaaagcgtgtgcttgtcaaatggagagaacggttatcgcaccgcttcgttccttcaaataaataaattgagctttggtcagaaaatgcccgcaccagctcactgacacccggctcaatcctgccgccgtggggagcgaggacgatacatttacttccctctttttcttcataaataattctgtattccgattcagcagcagaaagggctgcgaaattgtcatatttatctttcatgtgtagcatgctctccttttccagtcagcaccagtttactctactcatctgggaatggaaacctttttatagtatgatttgatagaatacgtatcagggggggatatatcatgggattcatcaatggattgctgggcaatgcgtcgacaatatcgacggctgaagcaaaagcagaactggctcgtattctgctggaaggtgagaatgtcaacgccgcatttaagctcgtccgggatatcattgtctttacggataagcgtcttattcttgttgataaacagggactcacggggaagaaaacggagattcaatccattccgtacaagagcatttccagattcagcgtagaaactgccggccgctttgaccttgattcagagctgaaaatttggatttcaggcgcggaacttcccgctgtctcaaagcagtttaaaaaagatgaaagcatttatgatattcaaaaggcccttgcagcagtttgtatgtaagaagaaacggaagcccggggagcttccgttttattgattacagtttttcttcaattttcgccttcgttttcgggccgtaaattccgtctgccgttaatccgctgacggattgaaaacgttttacggcatttgccgtcttcggaccgtaaacgccgtccgccccatgattttttgctcctttatcgggataaaaataaagagcggataaagcgttttgcacttgttttacgtttgtccctttcgtcagcggtttcgtcactttgatcacaccggatggaagcggataggaagacacagcctgactttttgaagaagaacccgtctgagcgagcttgatcacttgtccgactgtaatgtgattcgggtcggtgatatggttgatgctttgcagcgattttacgctgacaccgtgcgatgcggcgatttccgataaggtgtcgccttttttcacatggtattcagacgcggaagaagcaatagaggcttttttcgccggcatactcccgcttaatttcttttcaatcttcgccttcacttcatcccagcggccttcagacaaaatgcggtgcgggcagtactttccgttccagtcctgatgctttctgattctgtcaatcccccagccccgttctttcaaaagctgcgccgcaaacgcaatcgccagttcttctgcggctctgtaccgttcgccgcctgacttgctgtaacagatttctatagcaatcgactttcggtttccggtaccgttcgtgccgtctcccgaatgccaggcattccggtccaacgggattccctggatcacttctttgtcatcaaccgcaaaatgatagctcgttgattcgctgtttcccgtcatatagctgatttcattagcggcggatgcgtcgtttgccgtgttatgaatggtaatatactccggcgtcatcggattcggacattttaacgcatatttatcagccgatacgagccgttttttcacttcaatccccactcttcatctctccttatgcctttttcatcaataggtggcattcgtaggacagataacttgagcatatagaccctgcattcggataaaaatggaatggatacgcatgcaaaaaataagacccttccaaagaagggtctttatgttatgtttggttgcgcgcggcaatatggaatgtgccgtccgcttggttttccaaatggctttcatggccgatcacctgtgtaaagctgaatccgacagcaacaagcagcaatcctgacaacagtttagatttcatatagacaatctcctctctggatttgtttttgggcgtgcaccattttttcataaaacgtgagcgctttttcaggctgtccgtgtttcatgtaaaatttggcagcatcatgcgccaattcttccacatacggatacagcatgtgttcttccagaaaatcaaacgtgtgcctgacggatgcgttatccatttccttgccgtataacgcatgtaaaaattggaacagattcacaaacaattcatcattgtattcgcgggcgatactgagcccgagacggtattgcttctctgcttcggctgtagtgttctgtttataaagaacctgtgttaatgagtaaatagaatgcggaagattatcgaacttttctgacctgcaaatggaaacggatgtctcaaaatattcggctgctttagagaggtctcccattttttcgtaacagtttccgagattatataaggctgaactgataagacggggattgccttcttgttttgcaagatctaaagcaagttctaagtggggcaatgctctttctggatactgcatgtcatcataattccctgcaataacgaattcacattggattctgcggacgttgtacgtctcatacgattggtacgtttcaagggcttgaacggcataactcatggagacgtaggtttgtttcaggttgtaaaatatctcggccattttaaaagcaaactcagctttctcgatgtcatcagaaacgagtgcaaggtttttttcagcccgtttgtaatacatcatggcgtttaggaacattttctgtttaaattcgtacattcctcgaaaaaaattaaagtagtaatcaagcagtcctgtcagtttatactggttgccttcaatgtcttccaataattctgaaaactcaggctgagaagggtcctcctttaagggcttgatgtaatccagcatgacacggtgtctgaattccattaatgaataatacagcagcagatcctgatcttcttccatatcctcgatctctctctctacttcacgtttgacgcgctccgcctcaagaacgtgaaactgccggatatgggtataccattcattaattttgagcccgacaaaagaggacggaatagtctgcttcatcctcaataaatccccccttttggaatgaccgagatatgtcatattttatcatatttgctagaaaaagaagaacgcaaaaagaccgcaattgtcgaatttcggatatccgcaacgatttatctccgtcacaagcttattgcttgtttcttccgtgccgttgatatagcatatccttgcagctttttattctgtattaaatgggggttttcacatgacagcacaaaatcagttggtcagccactttctgtcacatcgaaacgtaacgattgagctggcggaaaaaatcagccgcgaacattacgattacaagccggcagagacatcaatgtccgctcaggaacttgtaaaacacatggtttattcttttcttatgtttgcaaacgtcattaacgacggaaacgcatcagccatccagaacaaaccgaaagaagaagcagaaacagacctcgtcaaactggctgaaacgtgtactgaaaaaacgacaaacatcctgtcacagctgacagaagagcagctgaaccgcgaaattgacctgaccgcctctttcggcagaaaagtgaccggcgcggctctccttcagcttgccatggagcatgaaattcatcataaaggcaatcttttcgtgtatgtcagagaaatgggccacacggaacttccgttttatcagcaaaaatcataatccggccatccgccggtctgcgacataacagcaggctggcggattttttgttctgcataaaattttccgaaaatttaattgattaccgcctcttaatcatatataatctgataaaaatagtaggattattcaggaggcacacagatgactgtaagcattgtgtttatgggtttctttgtcggaacgcttgtcggattgacgggtgtgggaggagcagcgctcttgactcctttactgatcgttttggggatcaacccctcaatcgccgtcggcactgaccttttatataactccatcaccaaactgttcggtgtcgtttctcattggaagcagcgcaccgttcaatttaaacttgtcggttacttggcgctcggaagcattcccagcgcaacagccgccatcggtgttcttcacttgtttcccgcttttcaccagcatcaggagcagattatcaaacaggcgctcggctacgtactgacccttgtcgccatttccattatcgcccgcctttttttcgataaaaaactgcggccgaaccgctggcagcaaaaaacgcttgaagaaaagcggacactcatgatactgatcggcgtcattttcggcttcatcgtcggcctgacatctattggatccggctcattatttgcgatcgccatgttatacctgttcagaatgaaaacggcagaagtggtgggaacggatatcgcacatgcctttctgctcgtaactgctgccggtctgttaaacgcaagctttggaagcgtcgattacctgcttgtattgaatctgttgatcggctctgtgccgggtgtgcttctcggcagcttcttttcgccgaaattctcaccgcgccccctgcagtttgtgatggcggcgattattttaatcagcggaatcaaattaatataaaaaaggcggtctgttgtcagatcgccttttcccttataacgtcacaccggacttaaagattgcaagctcccgaaaatcgtttttttcgttattgacaaattctccgcttgcaactttaataatgtattgtataaaatctcttacaatgtgatcttctgttgtttgttcttccgccaatctgcccgcgtcgtaatcaatccaatgaggctttgattgaaataaatcggtatttgttgatactttcacagtcgggacaaatgtgccgaacggcgtgcctcttccggttgtaaacaaaacgatgtgacagcccgccgcggcgagcgctgaagaagcgattaaatcattgccgggcgcactgagcagtgtcaatccctttgttttcagtgtttcaccgtatgtcagcacatcagaaaccggtgcaagaccggctttttgggtgcagccgagcgacttgtcttcgagcgttgaaatgccgccttccttattcccaggtgacgggttttcataaatcggctgctcgtgcttcataaaatattgcttgaaatcattgatcaatcggactgttttatgaaacacttcttcactcgccgcgcgctgcatgagaatcgtctcagcgccgaacatctcaggcacctccgttaagaccgtgctccctccctgtgcaatcaagtagtctgaaaatctccctaataaagggtttgccgtaatgccggaaaaaccgtccgacccgccgcatttcaatccgatgctcaattctgacagcggaatctcctcacgtttatctccctttgccgcaaggtgtatttctttaataagcgcagtccccgcttcaatttcatctgtgacagcttgtgattcgagaaatttcacccgatctccgttcacttcagaaagggtttccctaatcgccgccagctcattattttcacagccgagccctaaaaccagcacaccgcccgcatttggatggcggatggcgtttatcagcatttgtttcgtattctcatgatcatcgccaagctgggagcacccgtattgatgctttaaaaccagcacattatcaaagggagcgatgtctttcgtctcttttacgaagcgctgcaggattttctcagcgacgccgtttacgcagccgactgtaggcacgatccacagttcattccggacgccggatgtaccgttttctcttctgtagcctttaaatgtccggttctcatttgtaaaaggattgtcctcgaagcgcggtgaatacgtgtattcttgcacatcggataaattcgtttgcagattatgggtatgaatatgctcgccggccgaaatccgccttgtcgcacgcccgattgaaaaaccgtatttaatgatgctgccgttttcttcaatggtttgcagcgcgattttatgcccccgctttacaggatccttcacttcaatcgtcagtccgtctgtatgcagccgctcccctttgttaaaatggcgcatggcgagaagcacgttatcgtttttatggatttttatgacctctttcatttcacttcccccttttttccgcagcattcatgtaacgcctgcttcataccccgcttatgaatgacagacagaaaaaaagccgttcgttcagtcagccccggaagatgattcagattcttcccccacaatcgctcttctcctaatatggcagatgccgcttgaaacatatcatctttgcaacgggaccgcgccatttgaaaacggttaagaacctcctcgccgtctgccggtttgttcggtccgttccagtatgaatagatcatggcgctaaacgaaaataccagcttctcaggtagccggccctcctgttcgatataagccttcagcgtcggcaggtttcttgttttgaatttcgcggcggcgttaagggtaatgctttgcagataatggtggatataagggtttttaaaccgctgtaacacgtctgccgcgtattgggtgacaccctccatttgcagcacagggaggatttcttcattgatcagctcttcgatgaatctgcccgtcacctcgtgctcagccgcttcccggacggtttgcagtccgtatagtaaagccactggcgccaatgccgtgtgagcgccgtttaagattctcaccttttttgtcctgtaagacgtaaggtcagacgtgatcagtgcgttcagcccggcctcagcaaaaggaagctcattctgaagctgttccggcccttctatcacccacaaataataatgctcaccaaccacaagcagacggtcttcgtatccgagaaaatcggtaagttcttccgcggtatcaacaggaaatccgggaacaatccgatccacgagggtattgcagaagatgttcgcgtcatgaatccattgagtaaaatcaggttccagctcccacagcccggcatattgaagcacggccgccttcagtttccgtccgttttcttcgaccagttcacatggaagcactatacaccctttctcggcgtcacccgcaaatgccttatagcggaaataaaggaacgccgctaatttcccggggaatgttttttgaggtctatcctcgagccggtcgcctttctcaaacgtaattcccgcttccgtcgtattggaaatgataaaacgaagctcctcttgtgctgccagccgtttaaaggaatcatagtcagaaaaaagatcaatgccgcggctgatggatttgacgatcatgtgttcttcagccggttttccgtcctttatcccctgcaaaaaaagcgtaaataaaccgtcctgctcgtttaaacgtttgattttctcagagcctctcggctgtacggcgacaacgcttccgttaaaatccgtcaattgattcaattgatcgatctgccagtcagcgaaagcccgcaaaaagttgccttcaccgaactgaaggactttttcaggatattgaatgtattcgccgcacatctttttattcagctgctgcaagctgtccgcctccttctgtatttatgcacacgttaacatttctccgtgtgaaaacccggataatcagacgggccgttatgtgagttttttaatggaatctcttatcatcacctcggtgttttcgtatattttttccgccgccgtatccgggtcggcgattagcgccaaaatcttctctgcgccaagtatgctgatgttttcaaccgggcgttttactgtcgaaagcctcggcgtcatgtattgggaaatgccgatgtcatcaaacccgataacggatatatcttccggaacgttcaggcccttggcgaaaatggcgttcatcgccccgatcgccatatcatcgtttgaacaaaaaacagccgtaggcggtgattgaagcgccaagagtttttccatcgcctgactgccgctttccatatcatagcggccttttacactgtattcatgcttaatcggaatagaatgatcaattaaagatgtcaaatagccttctttccgctgagaagttgacctgaatccttcctttccctcaatgatcgcgatatctctgtgtccgtttgcgatcaggcagtcgaccgcctgtctggagccttctttatcgtttgacaggatattcgtgatgctccggtcatcaatatcccggttcagcacgacaagcgggatgtttttctcgcggatatgataaataaatgaattatcactgtcgctttggctcattaaaatgattccgtcatatctcatgggcgtaatggtttcaaagcttttcaggtcgtcaatcgcgcggacgaacaaattgtattcctcactgattgtgcggtttacacctttgatggtatcggaaaaaaagctgtgtgaggttccgtttgtgatgcttgtaaaaaacagtccgatcgtatgggacttttgcatggcaaggctttttgcatttacattcggtgtgtaattcagctgtgaagcgagctctaatattttctgttttgtatgctctttaatgtaggggctgccgttaagtgcccgggatacggttgtgtgggatacgttggcgagttttgcgatatcttttatggttaccatcgtttttcctttctttctgtatgctgtcatttatttctattgtaccattaacggacagtccataaaattactaaagttaaggttttgcatgatgtaagtcctgaacgagctcggcatgctgccggtccgtcagtttatacattaaaccgataatcagcatggcgcacgctaaagcgaaagccgggtacagcagcagaagccctttaatcccgatcagcgtgccttttgtctgagatgcattcgggatatagccgataacgctcagcccgatgcctgaaagaaaacctgataaagattgggcgagttttctggagaagttgaaaagcgaatatgtcgtcgcctccttccgttcacccgtcttccattccccgtaatcaataatgtccgacacaagcgcccacgtaatgccgtttggtatgctgatcccgataaaagcaatgctcgctaacgccgtaaagataaatacgtttgacggcagacagaaattcagcgcatcagccgcggcgctgacggcgaaaccgatcatcaccgtttgcttttttccgaagcgtttgacgagtttcggcataaacaacacacctaaaaatgaagaaccgatgatgataaaactcatgtaggacatcagctccgcattgttgagattgtactgggcgaagtaaacaagcatagcggatttaatgttgtatgccgatattgagaaaatcgtcatgaaaacgacggtcagaagcggtttgttgccgataaagcatttgaaaaccgacatgacggacagcttttctttcggcgcttcacggacgataattctttctttgcagtttcggtagcagatcataaatcccgcgattccgattacggccatcattcccatgactgccgggtagccgatgtgaacgttatcaaaatgaacaagaatcgggatgacgatgacacttgtaatgagcagcgcgccgagggagcctatctggcggaatgcggaaagcgccgttctgtcctccgcatcctgtgtaatggccgcgccgagggagccgtacggaatattgacgaaagaataagcgatcccccacagcatgtaagaagcataggcgtacacaagcttccaggtgacgctcacgtccggtgacacaaaaatcaatacggtcatgaccgcaagaataatacttccgaataataagtacggcctgaatttcccccggggtccgatcttttttctgtagtcaatggccgagccgacaatcggatcagtcacagccgcaaacagcttgctgaccaaaaaaatactgccggcgaacgctgccggaatgcctgcgacatctgtgaaaaacttcagcaaatagatctgcccgagatcaaacataaatccgttcccaaaatctccaaaaccataggatactttttctttcagactcagcttatgctccttcacttttgcggcaggtgctgtcacgacaggcacattactcataggccacctctttcattccattttttaaaagcggaaatattcctcagcattccggtaacaaatcccctcgacaatctttcctaaaagctccatatcgtaaggcgcttcgccttgttccgcccagccgccgatcagcgtgcagacaagccgcctgaagtattcatggcggggataggacaggaaacttcttgaatccgtcagcatcccgataaaacggctgaacaggcccatgtttgataacgctttcatttgttggagcattccatctttcgtgtcattgaaccaccaggctgtgccgaattgaattttccccggtgttttcccatcctgaaagctgttgatcatgctggcgataatatagttgtcattcggattcaaagaatacaaaatcgttttaggcaattgccgctttttttcggcggaatctaacagccgggcaagcggttttgcgatacgttcatcattaattgagtcatatcccgtatcaggaccgaggctgctgaacttatttgtattggtatttcttaacgcgttaatatggaactgcatcgcccagtccagttcggcgtaaagaccgcaaagatattgcagcgtccgtgttctgaatttcttttcatcttcaaaagacacatgctctccgcttaatccggctgcaaaaatccaggccgcttcctcttcggtcgtctcggcataaaccatttgatctaacgcatgatccgacactcttcccccggcattgtgaaaaaagcggacgcgggattctaacgcatctaaatacgattggtaggtggtgacagccattcctgaagcgctctccagcgaacggacccaatcggcaaaacccgggctgctgatgtccagtcctttgtcaggccgaaatccgggcagcacttgaaccggaaaatcactttctttcaacagttcgtggtatgtcagcgcatcggcaggatcgtcggttgtgcaaatgactttgacatttgatttcagaatgagatcccttgcgccaaacccgtctccctgcaggagctcattcgtttttttccaaattgccgcggccgttttttcattcaatacgtcataaatgccgaaccagcgctgcagctctaaatgcgtccagctgtacagcggattgcctatcgccatcggcaccgtttttgcccaggcgaaaaacttctcttcatctgaagcgtttccggtaatacagcgctcttcaatgccgttggccctcatgatccgccacttgtagtggtcaccgtaaagccatgcctccgtaatcgttgcgaaggttttattttcatagatttcctttgggcttaagtgacagtgataatcaatgatcggcatgttttcagcatattccctgtacagctttacggccgttttactatccagtaaaaaatcatcacccataaaagctttcacactttcatcctccctcttaaaaatgttaacgttaacaaaatgattcttttttattttagcttcctctttctcacatatcaatcattttattttatttttcagaaaattgtatccgttaaaaaaagacactgccgagaaagtccggcaatgtcttctgtgtgatcttaagaattagtaagcgaggctgaataatcctttgatatgtgttaaataacgtacgttacttgcttctttcattaaagatgccggaagacctttcagcggagtagagttcgctccgatgatggcaaccgcgtctttacgtccgaggcttgcaagcgtaccagagtttacaggcttgaatgtttcaagcgtttttccttctaagtaagcgaacaggttgtaaccgacaagttcacccatctgccaagcgatttgcgctgtcggcgggtacggacggccgtccggcgcaaagtatactgcgctgtctccgacaacgaatacatcttcatgagaagtagattgtaagaaatcgttaaccgtcgcacggccgcggttcacttcaaggccggattcgccgactaacgggttgccttgtacgccgcctgtccatacaaatgtgttggcaacgacttttgaaccgtctttcagatcaataacgtttccttcaacatttgtaacaggaagacctgttaagaactcaacgccgcgtttttcaagactttttgtcgcgcgttcgataaggtcatcaggaagaacaggaagaattttcggacctgcttctactaatttcagtttgattgctttcggatctacgccgtattttttcgtaaggttcggcatgatgtcagcaagctcaccgacaagctcaacgcctgttaagccgccgccgccgataaggatcgttgcatcagcttcgtttttcgttttagcgtattcacgcacacggtcttccacgtgtttgtatactttgttggcatcagccgcagatttcagcaccatgctgttttcttcgagtccaggaatgccgaaataagccgtaacagaaccaagtccgacaacaagcgcgtcataagtcagcttagaaccgtcagaaagggcaacttctttcttatcaactgagaaagaattgacttctgcgattttaatgtcgacgtcttttcctttcagaagtttttcaagcggcatagcaacagcctgttcagacacgttgcccgctgcaaggcggtgcagttccgtaatgatttggtgagtcgggtatttgttcacaacggttacgcgtgcttcatctttactgtaatgtttgcgaacggttaaagcagaaagaactccgccgtaaccagcgcctaaaatgacaatatgttttgacatcgtatatcctccgtcctttatatcaatttgaatctgagattatttttgtttttcgttcatgatttcaagatagctgttagcaaaacggaacagcttttgagcttgaggatctttcagcatgcgcagcaggccgaaaagtccgatcgtttcattgcttgcatccgcgcggtcttttgcttcgatcgcagtagccgcaacttctttcgctgtttctttcaccggctcaagaatttctgtaagcgcacccactgtatcgctcttcaatacttcgtctgtcgctacagactgtgcaaaatcataagacttcgttaaaatatttactaactcagtcagttttggaagctgatccactaaaacagtcagtgattcttgaacttcaggttttagcagctgatcaataagatcgcgttggccttggctgacagatgcatttgtttgatcgattgtttctggcatatccgattctcctttactataagcagtatgctgatttttttggaaagggtagcctttcccccttcatgcagaaaagcatgaaaaagcaagattgtgaattcatgcacaatcatttacaaaaataaatgtttactacccagtttttcactttgccatatccagtattatttttatatcaacaaaaacaattgaataagtcaaaatttctttttcctctctgaaaatagcaaacataaaaaaccccaatttgatttactcttatataataacactttttgaacaaaatttgaacgtgaattgtttcgtttatgaaattatttatatggtgggggtgtaataacgtttcttttaggctatttttttacagaccatccgcttttcccctgtcatttttcccacaattttaatagcgggcccgtttttcccgtaaaggggtcgcattccgggagcgggacacggctgatttcttctgaagttctatcatttttctccgtttttgtatcgtactgccggccgcccggataagccccgatcacggtaaaatcagaactgcccgacagttttttatgtccggtgccggccggaatgaccgctgcgtcccccgtttgaagaacggcatccgctccttgttccccgccgaacctcaaaaccgcgtttccttttaccgcgacaagaacttcgtgcgtggtgctgtgaaaatggtgatacggaaatactccgcccgtccagctgttcgaccaatcgtgccggcggaggacggactctgctttctgcaccgtttcttcattaaataccgctttataaataacaagcggaagattcgggttattcggaatgcggccgtcatcttcaaaataaagcacttgaatatcctctttctgcattgttttcacctccgtatatgtctgtttcccattcatcatttgttaaaacgctattttctcatattccattgcgaagcctgtcggtgaatagtatagtataaaaaaatatggtcaaaatgagggatttaatgaaagccatcgtgatcggaatattggcatctctgttttttgcagtcacatttattttaaacagggcgatggagctttccggcggaagctggatgtggagctcttccctgcgttttctttttatggttccgtttttatttttgatcgtttatgtgaaaggaaaatgggcgccgctctggcatgaaatccgaaaaaaaccgtttttttggctgaagtggagttttaccgggttcgtgcttttttatgccccgattacgtttgcggcggcatatgggccgggctggctgatcgccggcacgtggcagattacaattgtcgcgggtgtgcttctgtcgccgtttttctacgaaacaaaaaattcaccggcgggcccggtttccgccagacaaaagatcccgctcatttcgctggttacttccgtcatcatcctgatcggagccggtctgattcagcttcagcatgcgggttctctgtccggccgcacgatactattcagcgtggtgccggtcgtcatcgccgcatttgcctatccgctcggcaaccgcaaaatgctggaacaatacggcggaaaactcgatacgtttcagcgggtgctcggcatgacgctcgcaagtcttccgttttggcttttgatcgccgctttcggctggcatagagacgggcttccgtcaatgggacagacattccaatcctttatcgtcgcactcagctctggcgttatcgcaacagtattatttttccgcgccaccgatatggtgaggaatgagccgcagaagctcgctgctgttgaagcgacgcagtccggagaggttctttttgcactgatcggcgaaatcgtctttttatccgcggcgtttccgtcacttctttcatttgccggactgttcattattattgcgggaatggtcatgcatacattcgcttcccggcagacagaccagaaaacggctgagcaaacgtcagccaatctcaccggttcctgatttttttacgaaaggtgtcctcctgtatgaaagaagaaattccggcaatatcttttctgtcagctggcaaacgctttgaacaaaacaatacgtcctttgatgtcctaagccgtgtaaccggacatattcaaaaaggttctatcacggcgttgataggcccttccggcgcgggaaaaagcacattgctgtcgctgtgcaatctgatgaatacacctgatgaaggggaagtgcttgtattcggaaaagaaataaggcgctgggacatcagagagctcagaaaaaccgcgggccttgcatttcaatcagctcccgtcctcaagggaacggtgcgggacaaccttctgctcgcagaaaaactccacggagcacagcactatacgcctgaagagctcgcagattttacagaccttccgcgcgggcttctggatcgaaatgcaaaagaattatccggaggtcagcggcagaagctctcgttagcgcgaactctcgccggactgccgtccatcctgctgctggatgaaatcacatcggcgctggacccgtcatctgttctcatcattgagaaactgattacgaaactccatcggcaaaaacagctgacggtcctgtggatcacccataaccttgaacaagccgaacggttatccgatacggtatggtttatggctgagggacggcttttagagaccgcggaaacgaaaacgttctttaaggaaccgaaacatgaaaaggcccgggcgcttttacaagggagcgggtgctgatatgaatgatctttctctgttattgacaagtatatttgtcattattgctttattcctgtctaaatcttttaaagccggcgtcgaaaaggatatgatcgtcgcaaccgtcagggccgtcattcagctgcttatcatcggctatgtgctgtcgctgatttttcgcggtgatcacccgatatttatcatattaatggtgcttctcatgctcacggccgcttcgcacaatgtctccaaacgcgccaaaatgcggatcggctcattttggcgcgtttttctgacactggcgatcgcggaaaccgtgacgcagggacttttactgaccctgcatatcattccgttcacttcaagatatgtcattccgataagcggcatggttatcggaaactccatggtgctctcaagcctgtttttaaacaagctcagttcggaagcggatctgcggaaagaagagatccaactgattctctctctcggaggaacgcctaagcaggccgtccggcagatattgacgtccagtatgaagctcagtatgattccgacgcttgaaagccagaaaacattgggtctcgttcagcttcccggcatgatgacggggcagattttagcgggggctgatccgatacaggcggtgcgctttcagctgctgatcgtttttacaacgatggcctccgctcttcttacatgtatcatactcagcgccttgacatatccttcccttttcacggaacattggcaattaaaaaaattcagcagggaagcgtaggcttttttccctgctgaatgatttatgacaaggtcagagattcatagtaacgggataattcaataatcatcgctcccatccgctcaatgtccggagcaaggaccctctttaccccttcatcccggatcgcttcagccgtcactttgccgactgcggcggcaagcacttgtttttcgaatgcctgctgcacttcttttgtgaaccctttttcttttgcataatcaaagagagaacgcacttgaatggctgtcgtaaaacatacggcatcgacctctccgtttaacagctctgccagcagtttatcgaccgtctccctttcaggcggaatatgctgatacggcagaacagggaatacctccgctccgtttttctcaaggaactccgttaagaccggcgctttttcgccatgaagctgtatcatgacttttttatctttaaagtcaaatcgttccaaggagcggatcagccctcttgttgtaccgtcttcatctgaggcatgcggcgtgatgccgagcttttttaaggccgcatatgttttatagcctctgcagccgattttcgcttcatgaacggccgctaaaaattcttctttcagaccgattttttccgataccgacaataacgtttccgtaccgatgcctgtggtgaatatcacccagtcggctttttgcccggcaaatgttcttacgtcgggttcaatttgatcctccgccaggtatacggttccttggagggaacggacgaccgccgttccgccctgcttttctattaatcttgtgatctcttctattttccgcgaaccgccgatggcaatccgtttcccgttcaatccttttcccatcgctgttttcttcttcccttcagatgccgggcgccctatggcaggccgtcatttatttctattattgttacgcaatcagccgggaaaatcaagctatgctcccgttgaatcccccgtgcagttgctgtatcattaaccgggcagaacgatttgattcgcggagggattttcaatcatggaaacaaaaaaagagttcgagacaaaaggatacgatacttcggtcatttatgagttcaatgaatatcctgatgctcacagcggccgatgtgacaattgcgactacacgctgtttaaaagctcagtgaagggcggaaaatttttgagggaatgccggagatgcggcatgaagaaaaacatataacaaaacaggcagccgtcttccggtgcgctgcctgtttctcaatcaattttcgacggccgccgttttcaaaaattcttcaatggcgcaaacagcctgtttggggccgccggtttcttctattttctgctgcatgcttttcacgcggctgaggatgtttttatcgccgtatacgttttgaacgtctttttgcaaacgggccacagtgacttctttcggcggcagatgcacgccaagccccaattcatccacacgctttgcggtaacctcttgttcgtgcatttgcggaacgacaacgagcgggacacccgcattcatcgcctccattgtactgttcatcccgccgtgagatacgaacagctttgctttctccagcacatcaagctgaggaacgtgctggcggatgataaagtgatcggggacatccgaaaaactttccggatcaattgttgtgccgactgacataataacccgccagtccgagtcccgaaacgcgtcaatacacatctggtaaaattcaggccaggcgttaaacgccgttcccagtgagatgagcataagcggacggtcatcggctgcatcaatttccagacttcccgtatttgtgcgttctccaagagacggacccacaaaacagaatcgttcatcaaaggtttcctgtttcggctgaaaggcccttggcataaagacaatattcagtttttcaggcataaaaaattcttccattgtcatccgtttcaattgttcattttcaatctgctcctgatattcttctatcgcctgtttggccgcttccagtgtttcttcgtctcttcctaattgaaaatactcattcattgcatagctcgggcagaactttaccgccgggatgccgccattatccgcaaacaattttccggcaagagctaaaaaatcaaacaggacgatgtcaggaaggtcgtctttgtacagctcttccagctgcggaagcacttcaaccgcttcttccagaaacatcacaaacgcgtcatttttgtttacccgttcttttatcgtctccgggtccgcctttatgcttgtgcggtataaaacgggaatggcgcccgttttggcaacggaagcttcgaattcctcagtcgtagcgaatgtcactttatacccgcgattgacaagttcctcggctacgggcagcgtgggattgacatgaccgtgagcggccacattaataatggcgatgtgtgtttttctcatcatttttcttctccctcattttcgtttatctccgcttctaaagactccagcccgtacatgacactgtttcggatcggctcaatccggacgggctcaaggtgtgaaaaggcttttacaattcctttcagcgcgacttccgcttcaagtctggcaagcggagcgcctaagcagaagtgtacgccgaatccgaaggaaaggtgcggattcgattggcgatgaatatcaaatacgcccgccttctcaaatttgttttcatcacggttggcagatgcaacgtagcagagaacgatctccccgcttttcaagcggcgtccgcgcagttcagtgtcgtgccggaccgtccttctgacaaacggagcgggagcgcgaaaacgcagcgtttcttccaccgtttgcgcgatgagagaagggtcctgtctcagttcgtcataaaggccgggcgtctctaatatgctgtaaaccgcatttgaaatgagattagtcgttgtttcatttcccgccactaaaagcaggttgcaaaacgggatcagatcttctgccgtgagcttctctccctcttcttcctcttttatcaaaatagaaataatgtcttggccgggctgttttcgtttgctttctattatttccgcaaaaaacgccgccagctccgcctcacattggtcacgttcctgctgatttttctccgccgcttcagggctcgcatctttcggcatgctgacgagaatgtccgaccattttttaaactgatccatacgttcggacggaacgcctaataattctgaaatcaccatgaccggcaaagggtaagagagatctttaacgatatcaatccgccctttgttctttgcctgtttcaggagatgatcggtaatgtctttaattcgcggctcccattccttcaagacgcggggagtgaaagcgcgattgacggcggatctgatttgggtatgcttcggcgggtccatattcagcatggactttgcaatcgagcttttcacatcagtcatgaggcttgagaacgtctctttatcactgatgacttttttgacatcatcgtataaaaacacactccaaaccttcgtttcttcatcaaagtgtatagggctttcccgtctcattttttcgtaccaaggaaaagggttgtatacgtccaggccgttttttcctttcatcagggttctttggatggcttgtctcgtgctcctcagcttactcatatttcatcactcctgattgtttcatatttgaatagttgacgtaccttgaattttatcctagcacatattttcaatttttttctattcataaccttaactattaacataacacaacaaaagtcatgaatccggaggtgaaatttctcccaagaaaacagcagaggcgcacaaaaaacccgagccttcggccaggctcgggagatatgttcactcattcgtctgcggtttctggtgctgcttttggtcttcaggaggctgcgtatttctttccatatcgtccgtatcagcgcccatgcctttcaggaaagaaaacagcagagtgacggccttgttgatttccgggtcttttaaagcgcggacgatatcaaaatacccggtcttcctgccgctgtctttttcctcgacggcctttgtgacccccgcattgattttaacgataaatggctcaagctgttttacatcgagcatgccgagaacgccgcttaacagcaggagatttttcagcatattggccgtttccggagtattcgccttcttcacgaggatatccatcactttgtctccctggccgaagagcccgcgcagaagcgccaaaacgccgcgctcgttcatgtgctgaagaatgtgcagagattccaaaatcgcgtctttatttcgtaaaagagctgtctcgatctcttctaagtccttttttcgtttgtcttcttctgtgacggtctgttttcggatgccgctgattgctttagccattttgctgtttccccctttttacggcgtctcccggaaatacataatctttacgcgcccatttccgatcaacccggacaccgatctgcggctgcgggcttccgtaacggaaattgattttcggaagcggattaacgccttcttttttcaaaatctccatcttcgctgatgtttctttataagccggtgtatcggtatccttatccgcatagctgcttgtcaaaaggttaatggcagcgtcttttgaatcgttcatcgggagatagacttgtttgccttttaccctgtctgtgatgacgcatttgactttcacatttccgtacggtgatgtcagacggacaagcgttccgtcttccagccctctttcttcggcgagttcgggcgagacctcaaggaacacactcggtgttttttcggatattccttttgatcggtaagtcagattcccttcgtgaaaatgctcgagcagccgcccgttattcacatggatatcatattcttcgccaaattctttcggctcggtccactgaacgggatatagaatcgctttgccgtctgaaaacgggaacttatccgtaaataaaagcggtgaatcggttccgtccgctgcaaccggccattgcagtgaattgtagccttcgagacgttcgtaagtgacgcctgcgtagagcggcgaaagcatcgccgcttcttccataatgtctgccggatgttcatagtgccaatcagcgcccagacggttggcgatgtccgtaatgatctgccaatcaggctttgaatcgcccagcggttcaaacacttcgtaaaggcgctgcaccctccgttccgtattcgtaaacgtcccttctttttcaaggctcgggcttgccggaagcacgacatcggcgaactcggccgtacgcgaaagaaagatatcctgcacaacgaagaaatcaagcttttcaaatgcggcatgaacatggttaatattggagtcgacaagccccatttcttctccttttaagtacatggacttcagttttcctgagtggatgccttcgatcatttcatgatttgtcattccgatttctttcggcaagtctgttccccagccctgctcatactttttgcgggctttttcatccgttactttttcataaccggggaagctgtcaggcatactgccgaaatcactggctccctgcacgttattatggccccgaagcggatatgagcctgcgccgggcttgccgtaatttccggtcacaagaagcatgttggaaatggccgtgctcgtatcacttcctccgatatgctgggtgacccccatcgcccacagtgcgcacacgctgccggcttcatgaatcatccgggccactttgattagggtatccttgtccacaccggtatgtttttccgcatattccattgtataaggttcaaggcttttcacgaattcatctaatccgttcactctctccttcagaaatgcagtatccgccaaatcgtgatcaagcagatatttcgatacggcattcagccagacaatatctgatccggcacgcggctggaaaaacacatcagagcgctcggccatttcatgttttcgcaagtcagcgacgacgagcttctgtccgtgcagtttatgagaacgtttaatgcgtgtggacaggacggggtgagactcagacgtatttgaaccgattatcagcacgagctcagctttttctatatctgtaatcgaccctgaatcaccgccgtatccgaccgttctgaacaatccggccgtggcgggagactggcagtagcgtgagcagttgtcgacattatttgtgccgatgacggctcttgcaagcttctgcatcacgtatgattcttcattcgtgcatttggaagatgtgataaaggcaagtgcgtccgggccgaaatgttcttttatatcggtaaatttatcagcgatcagctgcagcgcttcatcccattccgcctcccgaaacgagtctccttcccggataagcggtttggtaaggcgcttttcactattgacgaaatcccagccgaatttccctttcacacacgtcgaaatgccatttgctggggcctcggcctgaggctcgacctttaaaatgtctcttcctttcgtccatatatcaaaactgcagccgacaccgcagtatgtgcatacggttttcgtttttttgattctttcatcccgcatggccgattccatgtccgatatggccaaaatcgatccgtatccggtttcgacgccttttgtgatgtcaatcatcggccgaagcgtctcttggttaatgcctgttaaatagcccgcttcgccttccatgcctttttccatcatggcattacacggacataccgtcgaacaatgtccgcaggaaacacatgatgattcattgatcggcacatcctgatcccaaatgacccgcgggcgttttcgctcccaatcaatgcttaacgtttcagttacctgtacgtcctgacaggcctcgacgcagcgtccacacaaaatgcactggtcgggatcatatcggtaaaacggatttgattcatctttaggatacggtttttgatcgaacggaatgctttgatgattgattttcatttcctttacggtattatgtacttcgcagctcccattgttgtaatcacagaccgtgcagtacaattcatggttgtgcaaaatgttgtccatgccgataatctgcgctttttttacatcggacgaaagcgtatcgatgacatctccgtcctttatttgcgcggaacacgaacgcaccagttccccgttaacattgacgatacaggtatcgcacgtttcaatcggcccgagactcgggtgataacacacgtgcggcacgtcaattgaactattgttcaaaagctgcaaaacggtttggccgttcggcgcttccatttcaaccccattgattgtaaccttctttgtatcagccattttctcttcccctttctgtacccctctatacatcctctatgattcccagccggcctttcactaaaacatctcgtttatctcaggaaacatacgggtatgagcggtaaaaaggaggcgttcacatatgttgaagaaaaaaacactcgccacgggattatcggcagtgatgctcacgggatgcgcattcggcgcagaagcattttcggttacacagcccgtccacgccgcatccgcttcaaaaacggaaaaccaacgtgcacaagaactggtgaacagcctttaccaatcggcgtttaaaggggaaatgccgcaaaatgtgaaaggcctgaaaatcaaccaaagcacaagacaggacgtttacgataaaatcggcgagccggaacaaaaagcagacagccgcaatccatttgatttatacagctggaacatgggaaaccccggttatggattttcctatcataaaaacggaaaaatctcggaaatacgctatttcggaacaggggtcgagcggcgcttaaacctcggcagcgtcacacctgacgtcttaagcaaacaaatcggcagcgctgacaaaatcctgacagtgccaaaaacgggcgaaacagattacgtctaccatacggggcagtatgagctccgcttcgtcatcggcagtgaccaaaaagcagaccatgtcaacctaaaagccagataacgcaaaaaaagcggcctcccgggccgttttttcatagacagcttttccgtcgttccttacaatacatgggagtacaaaaaaaggggaacagtgtgaagtgaatagacatccattgacatacggaatatgtaccgtttttatcatcgccctcggtttgctgtccagaaccgcatacatcaccgccctattgcccggcatcataaacgcttatttaggagatgccttgtgggcggcaatgatttttacaggattcgggcttctgtttcggaacatccggacggaaacagccgcatttttgagcctctcgttttgctgtctgattgaatgcagccagctgtatcacgcgccttggattgacgcaatcagaagcagcacgctcggcgggctgatcctcggctggcaatttgtctggagtgacatttttgcctataccctcggggtatgcgctgccgcatttttagaatgggccgtaaaaagaaaccgccagtctccttcataatcggagcatgccgccgatatgaagggataaggaggtggaagctatggatatccctgcgttatcaatcgcaatgcatcaggcatctctggcgcagaatgtaaatatcgctttaacaaaaacggtcatgcagcaagcacaggctgcggcggaagaaacagtgaaaatgctgccgtcccagcacccgactgccggacattcaattgatgtgaaagtgtaaaaaaagatgccggatgataaccggcgtcttttttttgcccgttgtacgtacaccataccgggcatacaggaataaggtaaacggaaccaaacatttgaaaaggaggttttcctcttgtacgatcctttctatcatgaatacacagccgagagccacgaacgggtgccatatcattatccgcggccgccttattatttccccagaccatatccatactatccgcggccgccttattattatcccagaccatatccatactatccgcggccgtatatcccgttctatccttggtattaatgtttgaaaagaaatgaccgcagacaggaggcttcccctgtctgctattcaactttgaccgacaggatatacgggagggcttgaactttttccattatcgccgctttcccgcttttgcttttcacccttcccttcacttcaagcaccgccttattcaattcataggacgtaatcagaattcctttttcctcaagagaagttaaaatatcatgcatgacggctttctcctcaatcctgaaactgacagacaaagaatgcgccgccggtttaaacagaaaatttaacagttcaagcccgattaacgccaaaatcgtgccgctgatgccgatgacatacatacctgccccgatcgtcagcccgatgcccgacgtagcccaaatccccgcggccgtcgtaagcccccgcacgacatgccgctgcaaaataatcgtgccggctcctaaaaatccgacgccgctgacgacctgcgccgccacccggctcggatcaaaggacgtatggctgttggataacaaatcaaaaaagccgtatttggaaacgatcatcatcaaagcgctgccgacggccactaaaaaatgcgtcctcaaaccggcttccttcgccctgaattctctctccaatccaataagagccccaagcagacccgcaaccgccagacgaatcacaaaatcaagttccatccgtctctctcctttccttatcttcttacccgcttttacaccccaatcatgcggtgtatctttttttaaaatgcaccgactaattgacataaggaggttttatgaaatttattctgtggttttttatattattgttatttagcttatttattttgggaggatataaagcatctgtttctcaccctgatttcccggtgccattattcgctatgcacactaaaacaaaggaatatgaaaaaggaaaatacgtttcaaactatacataccgtttcgcaaaagaagaagaaggtccgagcggtttataccaattggaaatagccgaaaaaggctggaaacttatagggcaggaaggacttatcaaaacctatgaaaagcgaggagaacgtgtttcactttttttcggtacgggggaaataagcgtcattgaagaatgatccttctcaaaagacaggctgaaatccgcaaacggcatatcttttacgacttcctttatctctgcgaatctataaattcagccaatatctcaattaaggcgaacacctttctgatccaaaaaatgccgccttcaatgagaaaatcattatacaaaaacaaaagcgcaactgaaaaagaataagcacctcataaaaaaagccctctttttaaaaaagagggctgcagaaggaaaacaggtaattatttatctaaagtgtactcactcacattaaaagtaagaatgttcccaaaaacaatatgatcccttctattttgaaaaggccctatattattatagtgcttctcgataacatatctagataagcctattccagaacttttttgatcataccatctgataaaatctttaatctcttccattgaaagatcaaattctttctcaagacctgtggtcattgtaacaagaagaattgcccgattactggcgggctgtttatttggtggttcctcccaactgcatctctcaaacagaatgtccggcaatcacctcaaaaaacgaggtgaaatctgtcagtatcccgtcacccgccagctgtttttcttcaaataacgcgcggttttttccgagcggatcaatggccataatcttgcctgcacctgcttttttcgccgctgtgagccccgaaaaggcatcttcaatgactaagcaatcttcaggtctgaggcctaacttttccgatgcgatgagaaaaatatccggcgccggttttccggggaagctcccgtcatcaaacgtgactttgtcaaaatcaaaccaccgatccaactgaaagacgtcaaagtaaaactcgacattttcctttaccgtagccgtggcaatggtcattggcgtttctgaatttttcagatgattcaatacgccggtcagtcccttcgtcagctttaactcatctttgttttcaaggcataattctctgtagtaggcttctttttcaaaagacagcttcttgatttcttcatttgttaaatcgccggaaataaaatacgtcaggatttcactgtttgttctcccgtgaatgttaacgaaaatgtcttcatcagaaatggttttcggcgcgtattttttcaccatgaaaaaccatgctttttcgtgcagatgcgaatcttgaaacatcgtgccgttgaaatcaaaaataacccctttcatcgaaccgcccgccttttttatttttttgcgattttgacatctacatattgctcgtaatgaatttgaacatctttcatcactttatcatccgtaatcagatagtccatatcgtgcaagttatagaatacgtaaaaatcttcccggttgaattttttattatccgccagcaaaaatttcgtccgcgaattattcagcgcgatttgatgagcttccccttcttcaatgctgtaagaagaaatctcatcattatgtatgccgttggcgctgatgaaggctttcgtaaaattgaatttctgcagattgccgttcacgatgggcccgacgaaggcaccggtgttttttcggaaatcgccgccaatcaggatggtatcggcagtgtcaccatgttttaaaatatcaaatacgggatagttgtttgtgataatcctgattcgcttatgcagcaggtgtttggctaaaagttcaatcgtcgtgccgggccctaaaaaaacggtatcgccgtcatttacatatgaagctgcgagttccgcgatcttccccttctcctccatttgaacacccagtttttcattatgcgataattcgtgatcaatggaataagatatgctctgtgcgcctccgtgaatacgtacgatttttccggccttatccagttcgtccagatctcttctcactgtcatatcagaaacttccaattcatcgataatatcactcaccgtaataaacccccgcgagtttacgctatcgatgatttttaaaagtcgctctttttttaacatgtttcaatcatctcctcaactttacacacaatctaacacaccgcggcactccggtcaacaaaaacaaacactaacaaacaccataatcaacatataaaacaacgaaaaacttatataatccctatgaaaacagatgttatttctttatgaagctattgacaacaaaaatgtatgcgtttactattaaacaaaagataacaattacaaacattaacaaacttaaattcacacattggcgaaggaggattcagtaatgctcaaattacctcatgactttattttcggcggggcgactgcggcatatcaagcggaaggcgccacaaaagaaggcggcaaagggcctgtggcctgggatgaatttcttgaaaaacagggaagattcagccctgatccggcaagtgatttttaccgccagtttcccgaagatattaaactatgtgaaaaattcggaataaacggcatccgcctttctatagcctggacgagaattttccctgacggcacgggcaaaatcaatcaggaaggtgttgattactatcatcgtattttctcagaatgccataaacgcaacgtcaccccttttgtcacgctgcatcatttcgatacaccgaaaagattatttgatcagggagatttcctcaaccgcgctgcaatagaagcgttcgtcagctatgcggagttttgctttaaagaattcagcgaaatcagatattggagcacgtttaacgaaatttatcccacagccaccaaccagtatttactcggggttttcccgccatctgttaaaagtgatatcacaaaagtcattcaatgcctccatcacatgatggtagcgcatgcgatgaccgtcaatctttttaaagacggcggctatccgggagaaatcggtgtcgtccactcattggaaacaaaatatcccgccagcgactcagaagaagaccgtcacgcctgttttctggatgacgcgttatcagtgagactcctcctcgacgccacctacctcggctattattctgaggaaaccatgcgggctctggatgaaatctgtgaggcaaacggcgcttcatacgagttttcagacagtgactttgacgtgatgaaaaaagcttcaacgcgcaatgattatctcggcatcaatcattatcaatgccatttcgtcaaagcgtacgatggagaaaccgttattcaccataacggaacgggcgataagggcacttcggtctataaagtaaaaggaatcggcgaacgaatttacaaagaaggcctgaagcggactgattgggactggctcatttatcctgaaggcatgtatgacatgctgatgcgcatcaaacgggactatccgcaatataacaaaatgtatattaccgaaaacggcatgggctataaagatgagtttgaagacggcatcattatggataaggcaagaatcgactatttaaaagtctatttagaagccgtcagtaaagcgattaccgacggagtcaatgtaaaggggtacttcttatggtccttaatggatttattttcatggaccaacggctacaacaaacgttacggtcttttttacgtcgactttgacacccaaaaacggtacccgaaagaatcggcctactggtacaaacttgtaagtgaaacaaaaacaatcatttaacgatcatacatggtgaaaagattctcttttcatcatgtgtgccgtctttaggaggtttttttcatgacaaaggaagaattgcagatgctcggttttgaaatcgtcgcctatgccggcgacgccagaagcactttattgaaagtcctgaaagaagtccgtgccggaaacttcgaaaacacggaagcagcattgaaaagcgccgatgaaaatttaaccctcgcccacaatgcgcaaacgaaaatgttagctgaagaagctgacggcaaggacatggaattaggatttattttcgttcacggtcaggaccacttgatgacaacccttttgctccgtgatcttattcaggattttatagaactctaccgaagccgccgataaggagtggaaaaatgaacggtatcatcaagcaaatcgaaaagggaaaaccgttttttgaaaaaatctcaagaaacatttatttaggcgcgatccgcgacggcttcttaacggccatgcctgttattttattcgccagcattttcatcctcaccgccgctgtgccggaagtgttgggtttcacttggcctaaaagtgtttctgaatggctttggaaagtttataactattcaatgggcgccctcggtctgatcgttgcggcaacaagtgcgaaatgcctgagtgaatcaatgaaccgaaaaatgcctaaaaacaaagggatcaaccccgtttcagcgatgcttgcttcagtcgtcgggtttctcattttaagcgtcactcaaatcgatggcggattctccacggaatacctcggcacaaaaggtcttttagccgcttttgtatccgctttcataacagtgaacgtttacagattctgcgtgctgaaaaatattacgattaaaatgcctaaagaagtaccgggtaccatttcacaaacatttaaagatgtttttccgttcgctttttccgttttggccatggtgatcgttgatttattgatcaggaacacgctgaacgtatcgtttgcagaggctctctcctctctcttatcgccgttttttaccgccgcagacggttatttcgggatttgtgtcatttggggaatgatggcgctgttctggtttgtcggcgttcacgggccttctattgtggagccggccatcgcagctattatttacgcaaatgtggaggcgaaccttcagctccataatgccggcgagcaggcgtccaacgtgctgaccgtcggactcgggaacttcgtcggcacaatgggaggaaccggcgcaacccttgtggttccgtttatctttcttcttttcgcgaaatccaagcaattgaaagcagtcggaaaagcatccgcggttccggtgtctttcgcagtaaacgaacctctgctctttgctgcgccgatcattttaaatccttattttttcattccgtttgttgtaacgccgatggtgaatgtctgtctgtttaaatttttcgtggatgtcatcggaatgaacagttttatgtatgttcttccgtgggccaccccggcgcccgccggcttgattctcggaaccggcatggggctctcggcttttgtgctgacggctgtattaatcattgtcgatttcctgatatacctgccattctgcaaagcttatgacaaagtattagcggcgaaagaagcccaacacaccgagcctgaaaccgcgccgcaaacattacagcccgccatggccggcgcctcagaagacgcggcctccgtcatcagcacaaatcttcaggaatcctcatccgccttggaacacggcaccaatgtgttagtgctgtgcgccggagcgggaacgagcgccatgcttgcgaacgcactgacagaaggagccgaagaatacaacgtgccgattaccgcctcagcaggcgcctacggatcccattacgacatcatgaaagacttcgatatgatcattttagctccgcaagtcggctcttattatgatgacattaaagaagatgcggaccgcctgcaagtgaaactcatcgcaacgaaaggagcagaatatatcagcctcaccagaaattcacaaaaagccattcagttcatactggagcatacctcaaaatagaatcggaggtttatcatggatgccaaacttttaaaatcaagattcgaagacattttcaagagaagtaacggagacctgtttttcgcacccggccggatcaacctgatcggggaacatacggattatataggcggccacgttcttccatgcgcgatcacgatcggaacatatgccgtatgcgcaaaacgcggagatcaccagatccggttatactcagaaaactttcctgacagcggcattgtctgccttgatctttccgccacagcatacaaaaaagaagacggctgggccaattatccgaagggggtgatccattaccttcttaaagccggcggccaaatagacagcggaatggatattctttttcacggtacgattccaaacggagccggtttaagctcctccgcttccattgaaatgttaacaggttccattttaagaaagttattcagcctggatgtttccgatactgaactggcgcttatcggaaaaagagtcgaaaatgaatttatcggcgtgaattcaggcattatggatcaattcgcagtgcaaaaaggcaaaaagaacatggccattctgttaaactgcgataagcttgagcacgaaatgattccggctgcttttaacggatataaaatcgtcattatgaatacgaacaagcgccgggagctggccgcttcaaaatataatgaactccgcagcgaatgcgacgcagctctctcggaactgcggcaatatcggaatatcgcatcacttgcggaattgacggcagaagaattcaacgaactcgaatcccttctctcctgtgaaactttgcgtaaaagagcccggcacgcggtcaatgaaaacgagcggaccctctcagccgcggaagctctcaaatcaaatgatttgaaaacgttcggcgagctgatgaatgcgtcccaccgttcgttacgcgatgattatgaagtgaccggtgacgaattagacgcgctcgctgaagcagcctggaaagaaggagcactcggagcgcggatgacgggcgcggggttcggcggctgcgccatagccattgtggaaaatgaagaaaccgccggctttatccgggccgtttcatctcactaccgcagcaggacaggtcttgaagcttctttctacatcgcggatataagcgatggcgcggctgaatggagggaaaaataaatcatggcgattctcgttctcggcggagccggctatatcggttctcatgcggttgatcaattattaaacaaaggatttaaaacgatagctgtggatcatctgcagacaggtcaccggaaagctgttcatgaaaaagcagttttttaccatggagatatccgtgacaaaccgtttcttcgctctgtgtttgcgaaggagaacgtaacaggcgttctccattttgccgctcaatcccttgtcggcgaatcaatgaaagaccctctttcatatttcaataataatgtgtacggtacgcaaattacgctggaggtcatgcaggaattcggggtgaaacacattgtgttttcttcatctgccgctgtatatggcgaacctgaaaaagtgcccatcacagaagacatgccggaaaagccggaaagcgcatacggcgaatcaaaactcatggcagaaaaaatgctgaagtggtgtgaaaccgcctgcggcataaaatatgtctcgcttcggtattttaacgttgccggcgcgaaaacggacggttccatcggagaagatcatcatccggaaacccaccttatccctatccttttacaaaccgcgctcggtcagcgcgaggaggttttgatattcggcactgactatgatacaaaagacggcacgtgcatccgcgattatgtccatgtttccgatttaatcgatgcccatattctcgctctggaatatttgcaaaacggcggagacagcggcattttcaatttaggatcaagcagcgggttttccgtatcagaaatggcggaagcggcccggcaagtgaccgaaagagacataaaagtaaaagcggccgcaagaagacccggtgatccaagcaccctcattgcttccagcgataaagcgcggaacattctgggctggaatccgaaacaaacggacatatcggaaatcattgcgtcagcatggaattggcatcggcaacatccaaacggatacaaggacaaatgaaatggaggcggcggtcattgaagtttttgaatcagtggcagggtttctgaaagaaagcactgtcttaggcgacataaatgaaacagatgtgatttatacaagaaacagacttctcgatctgctcggactgacggattatgcagaaccgaaacatatcaagaaacaaaacaggcttcactatttggacgaaatggtgaaagacgcggtaaaacggtcaatcattaacgatacgccggctgaaagagacatgctgggaagcaggatcatggacgtgatcacaccggccccttctctcatcaatgccgcgttcagcgaattgttatcagattgcccgaaaaaagcaacagattacttttaccgactgagccaaaacaacgactatattaagacgcgggccattcgaaaaaacatcgtgtaccgctcaataacaccttttggggaattggacatcaccattaatttatcaaaaccggaaaaagaccctaaagacatcgccgcggtaaaaaacagtccggaaaaccggtatccgacatgtctgctctgtatggaaaacgaggggtatgccggaacaccgcatcaccccgcccgttcaaatcaccgcatcatcaggcttgacttagcgggagaacagtgggggtttcaatattctccttatgcgtattacagcgagcatgccatctttctatcaagcgtgcacaagccgatgaacatcagccgtgacagcttcagaaggcttctggccattacggaaatcttcccgcattatttcgcgggatcaaacgcagacttgccgatcgtaggaggctccattctttctcacgatcattatcaaggcggcgcccatgagtttccgatggcaaaagcgggttccctctacccttttcatatgcgtcattttccagacgttcaggccgaagccgtgaagtggccggtatcagtgatccgccttcgcgcaaaagatccggatttgctgacagatgccgctgcctatgtttttgaaaagtggcgggaatattcagacgaaaccgtcagcatcatcgcaaagacaaatgaaccccataataccgtcaccccgattgccagacgcaggggaacggattttgaaatcgatctcgctctcagaaacaaccgcacctccgaagattatccggatggcatttttcacccgcatcaagatgtccatcacatcaaaaaagaaaatatcggtctgattgaagtgatgggactcgccgttttacctccccgcctgaaagatgagctggcagaagtgaaaaagtatttactgaatgaacctcatgacatcaaagatattcatcttccgtgggctgaaaacatcaaagcggataaagacgtgacaccggagaatgcagccgctgttttacaaaaagaaaccgcgaatgtatttttacgcgcgctgaccgatgcaggcgtttttaaaatgacacccgaaggaattcaggcgtttcagcgtttcacgacgttattggagaatggcagctgaaacattcagagtgaaatcaatcaacaatcttttttatcaggaggtattgtgatgttcaaaaaccgattgaaacgtgtatttataaacgcaatctgtctttctctcattttcactgcttttacattctttgagaagtttcctaaagcaaaagcggatgccccgtttgcctatggcgctgatataggatggctgaaacaaatggaggacgaaggtgtgcgctggctggatgacggcggaaaacagaaagatgccttgcagattcttaaagatcacggaataaatgccgtgagactgagagtgtttgtgaatccgccaagcagctattattggctgaaagacgggacaacatggaccatgctcggctatagtgacaaagcgggcgtacttgcggcggcaaaaagggcaaaagcgttaggaatgaaggtaatggttgacttccattacagtgatgtgttcgctgatccaggccaccagatcaagccgaaccaatggaacggctattcaaacagccagctgcaggcagccgtgtataaccatacgtacgatgtcatgaaagaacttaaaaatcacggcatctcccctgattgggtgcaagtaggaaatgaaatgaattcaggaattttactgcccgacggcagcacgaacgatttcagcaaattgaccggcttactgaacaaaggctatgacgccgtgaaatccgtcagcccggccaccaaggtcatcagccatttggcacacggcacggacaacagcctattcagatggtggtttgatcaattctttaaaaacggaggaaaaaccgacatcatcggcgtttcattctatccctattgggaaggcaagccgtactgggagctcaccagccatttatcaactaatttgaatgacatcgcctcacgctacaacaaggaagtcatggtggttgaactgggcggagatgaaaataacccgaaagattcctactggaccataaaagacaccataaaactggtgaaagcggttccgaacggcaaaggaaccggcgtattttactgggaacccgaagctcactccagcgttctgtcagacgcgtatccattaggcgcaaccgccaaagtgtctaaaaacgtcttgaaatacacaaccgcaatcgacgcttttcatgatgccgcaacaggaaaatgattgatgcgaatctcaagcaggctcattgtgcagcctgcttttttataaggctgtagtgttggcctgttatgaaacagagcaagtaacgaatacggaaagaaaaatactcaaaaacccacgtttcggttaaaaaccgctttttaaatagaatacttcttctcttccccctccttcttatttctgcgcactatctctcagttcctaaatcataactttacgattgttgaaaaagaaacaaacattttataatattgtgtaagcaccaccgagcaggaggacgggacatggacaaaaaagaacagctcctcacggatttcagggacttttttaacaagatggtgtggctgaataggctgaagatggaagaaagccttaaggggcataaaccttctgaagtgcattgcatcgaattcatcgaaaaaattgaagacgccaatgtgacaaaacttgcggagtccctttatatgacaagaggcgccataagtaaattaacgaagaagcttatcaataaaggccttatcgaaagctatcagaagccgcttaacaagaaagaaatctatttcaggcttaccgaacaaggaaaagtcatttataaaattcacgaggaattgcacaaagagtttcaagaacgggacaaaatcgtgtttgaacaagtaactgatgaacaatttgacacgatgctgaacttcgtggaaacatacagcaggcatttggattcagaaataaagaaacttggtgcagacttgaaatcggaataaatatgaataaaaccataggcagccctgccccatgaaaacgggctgcctttttatatccctcttattgttgacaaagaaacaaaatcactctattattttgttgacaaggaaacaaagacagcaattttgagaggagaatactatgtcaacacataaaagaaaggaacttcggcttccaaaagaagttctcacagccgcctgggctattgcactgggagcaatcgctccaatgcttgactctacgatggtaaacatcgccatcggcaaactgaccaaagacttcaacacaacattggatatcattcagtggtccgttacaggctatatgttagcacttgcgattgcagtacccgtatccggctggcttatgaataaatataacggtaagaaaatcttcatcggctcagtcatcgcctttggtgtcatttctgtttttgcgggaatgagccgtgacgtttccagcttcatcttcttccgtttgcttcaaggattcagcgccggcattattactccgcttatgtcaacactcttggttaaaacggcaggtccggaaaacctgggaaaagtgatggcaatcgtcagcacccctatgatcttcggcccgatcttaggacctgtcattgggggtttcatcgtccaaggcgcttcatggcattggattttttacatcaacgtgttcatcgttttgattgctgcaccgcttatgatgaaaaccattccagactttgaaccattcaacaaagatcgtaaactcgatattttcgggattatcaatttgtcattaatgagcgcggcattgatgtacggtattacaaaagcggcggatcatgcatcatttaacaatagcgacaccattttatggacgggcatcggtcttgtttcagcagctatttatcttgtatataatcagatcaagaaaaaccaaaccgtgctgcctatgaatttgtttgcaaacaagagcttcttggcatcttcgatcgggttgttcttagcgaatgttgccatcatggggccgatgttaatacttccgctgttttttcaaaacattcgtcagttcacggcagtcggagcagcactcgctttaatccctcaaggagtcggaatgctcgtgactcgtccgctgatcggaaaaatgattgataagatcggtgcgaaatacgtggttacggtcagtcttgttctttcgctgatcggatcgatcccgcttatttttatcaccgataacacaagtatgatttggatttccgtcgtattatttatccgcggcaccagttttggaggaattatgctaccattgatgagtgacgcttatacaggtcttgacagcaaacagcttccggaagcaggtgtcggtattcatatgattgaaaacctcggttccagctttgggtcagctgtgatcgcaaccgttaccgcaactgtcatacaaggattgcagccgacgattccgaacagtttaaaaggctaccatgccggattcttagtatccgtcatcatccttgcggccatcttcattccaagtctgttccttacccataaaaagactgccatataaagaactttttaaagtaaaaaacccttgcgcagcaagggttttaatgaatgaaactgatgatggttgccggcagagtcagccaacaacagacaaagccttttactcattcacattgcttttcattaaccattctacttccgttaattcttgtttttgaacgtcttttgtatgttttttcgtaaaatggactttaacagcttcttcgttttcccaaatctcccaaagcatgagtttgcgttctgatggttcgagcggataagcatggaactgaatacagccttcttctttgttcgtttcttcctcaagttttttgaactctttcattatttcattaaggtctttatcactgatgatttttaagcatgccgttatgtaatgcatcgaaattccccctcttcccatctttttatggctttacattataacatttatcgaaaaacgaaaccgcctaccgcattctcaacatataaaaaaccgtccataaaaatgaacggcaatgtttatttaagagcattaagagcgacttttgcagcctcagcgataagagcattattataattggcatcttccgtaaaccggtttgacaggattgccaaaacaattggggctctgtcaggcggccaaacgatcgcaatgtcgtttcgtgtgccgtagcttccggctccggatttatcgccgacttcccatcctgcaggagcgcctgcccgaatcagttcgtcgccggtagcgttgccccgcatccaatctgttaaaatcgtgcgcttgtcagccgtgagagtgttacccaaagcgaaagtcttaaggtcagttgccagtgcttttgcggtgcttgtgtcacgacgatccccgggaatcgcagagtttagatccgtctcgaatcgatcagctttcgttacatgatccccgatctgtttcaatgacttttcaaaacctttgggaccgccaagctgctgcagcaataggttcccggcagtattatcgctgtaacggacagcggcttctgagatttctttcaggctcatgcctgtatccaggtgtttttctgtgattggggaatatgtaaccaaatcgtctttgctgtagcggatgatggcattaagtttttcatttgagcttttcttcagaacagcagctgcagccagaactttataggttgatgcgtaagcaaaccgttcattcggccgataggcgattgtcttgtttgaacctgtatcaatcgcataaacgccgagcctggcatcaaattttttctcaagctgaacaaatttctgattcgttatacagcttgtcatttttgcgtcctctatagatttcgcttcagcatgcgctgagccgaataaaggattgaaaccggtaaagcttaaacataaaagtccaatgcatattccaaattgtattctcgctttatttttcacatccagacctcctcattataatgattttgtatacatcttctaattaacattacaaacagggtgaaagtcaatataattcctgtgtgatgttttccgtgacagttaggaaatcagctgaaaatttaattaaaacacccctgactcttcaatggatagcgtttcttccggcagatatttcgcgaagaacccatgtgatacagcgtttgatttcttgcttgagccacggccgctctacccggattcattttgccatctggaccatgcggcggaagcaggcggcgcaacggccgccgctcctgtaagtaaaacaactgataaatgattgaatgaatcgttttttcaccgtcattgcttctcctgctttttgtattctgcgatttccttaggggtagcctttcgcactccgtctgcgtctgtcctgtttgccacttgaacgccttccatgttttttatctcgctgacgactcccaaatgctctaaatacacatgatcaccaatcttgaaacgattctgtttggcccgctcctcggtcatgctcctgtattcagtcgcggctttcatttttaattcagccagacacatttgacaaagggttactgttacagaattgccgttaaaatcagtaaacgaaaccgatctgacagattccttttccgggtgcatcgtgcatgttttcttcataggcgatggccgtgtaaattcaatcattccgcttcctcctccataaaagtcttttcgtcccctgacataactccggatgaatgggaagttccatacactcgcattcgaactgtcacgacaccgccatctgacggattttcatacatccttcatagctgcaagcctatattcctttatattcccaatgcttgccgcacttccctgttaggatgaagtttctaaagctgttgaccagttgccgcatgttggttccatgcgaaaagccatgtggaccgccgtatcccaattcatacgggtaattttcagccctttcatatgtgtgtatgctttttaaaggaggcgcatcacatgatgttctaacaaccaattcaacttaaacaaagtgatttagtcgacaaaaagattgtcaggagcaaaaagaacggtgaatctaaaagcaattgatctttttgaatatggattgtaagtcaacgcattttccaaattaataagataaataaaaatagaccccctcacagttaatggtaagggggttattgagtatacggccgatatttcttttttgaatccaaatgtctgcattcccataccgtctacagatatactttctctagattggaatattttaagcatgtataaggataacaactgaaataaacgaagattatgcaaaaatggagtgatgaggtgttgagcagtaaagtgttttatgattttgccgccatgttaatgtacaaatatttaattaatactgtattagtttattcaatatgttaattttactttgatctttattactcttctttgttcttctatatccatctaataaagacttattataaaccttgaggtaatcatcaatagtcagcaaatgatatttggctccgtcatcttccaaaacccctaggttattatagtctacgtctgcaaatggttttaaatcctcaatgcaagcaatgcctattttagtattcgttttcctaaattcatgctcatgtaaatcaaccaatttatatccttgcagttccatacttttttttagcttttcccacttttcctctaaaaatattacaggaataaggatatcaatgtcttctggtgaaaagttcaacccagttaccttctcaagacctaaagatccatataataatggaataatgtctaactctttattaagagttttagctatatttataaattcattatacaatttcatctttatatccccaatttttggccatttagaatcaactgctacttggagtttctttggaattttataaatcctgtaggtcaattttataattttcactttaaaaggattctattatctcaatggatctcctgaagctatatgccaatgcagatgctttgaatcctgataatctcctaagtttgtaagcaccctgcaagaaccactttcttttgtcaccttcgccgcaacctttttaatcacacccagcaactcgagtaaaagttcattgtcgtcttcttccaaagtgattaaagaagagatatgttttttaggaatagcaacaatatgcaccggccaaaaaggtcttgtatgatgatacgccaaaacattctcggtttctaaaactttatttacttttgtttttccgcttaatacttcatcgcaataaaagtcttctgtcatcattaatcccccttactctttagctttgatcatcataatcaatatacaaattaacccaatgctctgctttatttttcacttttgttattaagataagagaaccacaataaacttatgaacccagcagctcctataattgtagatataatgtaagtccaattaagtaaatccataaacttctcctctgagaaataatttcaatacatcacattttgtgtttttttctgattaataaattctttattcttcctcaaatttatttattctgcttaacattctcctatcgtttttcgaagctttcttcagcgatcttttctcatataatgttcctttattaatcacaacaaaatcagtattattttgcacataaacttggaagtcagatgattcatagtaacccgtaacgttttctaaaaccgtcttggaattgtctttattatatagatcatagttgactggcggtctgctgattgcaaatttcccaaaaacagcaacatcatccttaccgggagtatggctcgctcctttaataaatatgacgctaaatattaaaatcaagaaaattgcaattaaagttcctgcaaacataaatttttcatttcttttccagttcaacataaacaacccttttctttatcatgccgtgttgatataagtaaatcttacaatttatgtactaacatataaatgtttagaatttaaacaagccgcttccattcaacatacttaaatcgctgctgatgaaggtcttccaggattgatgcccatttacctcagccttccgcaacaatgcttttttctctccatcctaaatccgttcacttcaaagttactcacccttccgaaagtgtttttacttagagctcagctacttaaccacaactttttgtacaagaatagagtcccaaagccaaaagatcagagcaaataatacgctgaataaatatatctcataactcgctagtatagaccctattggattataaggttcaaagagaacggccatgattagccatgtaacaaatgaagatactgtgtatattaagagatatgttaaattgaaccttctaggttttcggtttaagataagctgcaatggcaatgcaaaaattaaataacatgtcaacatgatcccgctaattataagataaggaacatattcagcttgatgcagggtgatcacatataccagtgtagaacatatggccgacaaaataaggacagctaggtatcttactaccatcaaatctatctccccttacgattaaaaaacaaaaatgcttgcaattgctatttttcgtaataataagatttgacccaaggatagcttctgcccttattttcacaccattcaacaaatccctttgattgttcttctttaaacaacaaccagtcattcaacaaatcttgataatagttaagctgttccttattgctttttcttgtttgttgacattctatcttgttgttcaactgccgggacttggtaagaagtgcttgatcttctttaatatcgcctagatataaatcttcggatatgtgatgaaatgaataccacaaggcgttcaaatgaatatcgattaacgttaataaagataattgttcattactgccgcccagtctaagtgcattatttaagtaatcgatacggttttcagtatttaaaaacacaccataccacctgtatggtcttggatcttcggggttactcttcatccatgcttcaagcagtggctttaaaagatccatttccaaagggtgaacaagtatatggtgaatatcatctgatgtttctaataaagcaaatagccaacaagcaaaattctgttgtgcatgattatcccacgttttggcttcatcgataaaggaagataatgctttaagggattctttacgtaaccctttttctttgagagagcaaaactttttaaataatgggtattcatccagtctgtcattttttaagatattagttaagacatctatcatgattcacatctctctttgcctagaataaacttaaacaatttgaaatacgacatacaatgcaacttcagctacaagcaaataaatcatatatctagcataatttaatacatcttgatcagtatttttctcttttttaaaagtccatgcaaataaacctaatacagttgttaccaatgcgatttcaattattgttattattgacataccttcctcctaaaaaagaacagggtaaatagacttatgttaattttcattcaattaagtctcttcagtcaggatgtatcttatgaaaaatttccatttcttcatgtttatcgccttcaatgagctcaaagccgcccggtacattatacattattttccgttaatatatcaattccggttaataactcacctgcatcttgaattacgccattttcatcttttacacactacaattcattatctaaaaatatgctccaaccttttaatcggcttaatcttttcaattcactttattcaaacgctgccgagtaattcctgcactccggtttctcatccataagctctcttctcaaatgcttaatcacataattaaaaggacaaagaagtgggtcaaatgattcattttaccattttagatagtacattgatcttattcctcattcctccatgataaaatcttgttaaagtatttcgaatgaaaggattatggtcatgaaagttttcgaagcaaacagcctgctggccgctgccaaacagcgtgcgagtgaatacaaagaactgcgcggccagatggttaatctaaaaaaagcgtttcaaggtatggctgacctcggtgacagcgacttttcaggccggggcgctgacaacatcaaagcctttttccaagaccacgccggcgtcacagacagctggcttgatctgatcgatatgaaaatcgcatttctcacaagccttcccggcaaggtcgaagatgccggactttccaattcgcatgtggaggaatcatttctagagcatgagctcacccacgccctcagtaaatcaaaggcaattatggaagggcaaaaaaaggatatgggggtccatcctcagagagatcgaagacatcatctcgctcgaattgttttcaaccgaaagcacagaacaaaagctttcttcagctgacaaaaaaagaagcgaaacgatacataagctcggcaagcttgatcacgatctaacgaaagaatacgcagaaaccgaagcaaatgaacattttatccaagcagatttccagcagcttcaaaacgcaacaggcaaaggaaaaagcgccacgccgcttcattacaacgccaaggcgtaccgtgaaagcgacatccataagaagaaaggcgatatcgcaagacattcggatgcttatttgacgattaagaaggaagaagcgaaagagcgtgaaatcaaggatctgaagaaaaagctggctgatggcgtaaccgacccggatgagtatttggaaatcgcgaaaaagatcggctatgaaaaccttgaacctgctcaggtggaatatgtgatgcagcttgaacaagcaaaacagctcgaagaagtcggagatacggcttgggatatcgtcaaaggaataggcgtcggcctttatgatgtcgggaaagacaccataaccggcgtcaaagatctggctgtcggtgcatgggatttttaccatctctctgaagaacaaaaagtcgctaaaaccatatcggctgtattgaacacaccctcctacgcaaaaatcatatggacaaacctggcggattcatggaatgataaaatggttaacggggatgcgtattcaagatcacattacatcacttacgccatcgggagcatcgtcgggctcaaaggttccggctcagctgtaaaagtatcaagcaagctcgcaaaaacaggcgccgccaaagtggataacgtcttggaagccggagaaaaagcggctgcaaaacatgtaaaaaccgggattgaaaaaggaaaagattatatcaattccatttcgaaaaataagtacgaacccgcacttgccggaatagcacaggatattgaaaatactcacaatgtgaaaaatacgcctttgttgaaaagtattattgaagatcagaaagagagtgttcttagaaaatctgtgtcttctgacaatagcggtatacatagtgttaaacaaggagacagcagtcctctcgcaccaggcggtggcttagctgctcacgaagcaaaaggcggacatcttatagaaagacatgttggtaagactgatgaagagttattagagaggctacagataaacaagaagatacgtgcctcttctagtttcactgataggccaactgcagaaagagtcgctaatgaaacattaattaaacataaaaaggaaattgaagagtggttaaaaagtgatgttaatgatccattaccgttaccttatagaggaactgaagttataggtagaggagttcgtaaaggttcaaatgaagttaaagatatgactaatgctagaatagtattaaaaaaaaatgaagatggtagctttatattaacaggctacccaacgaggtgatatataatgattgaaattaaagtttctgatcctgtatttagatttctcggcggacatttccaccaagatatagaatctcccgaagatgctcttaatgaatatctaaatgaagcatcacaaaaactaaaagaaagagatttaatagcactaactgagtttgtaaatagtgattattcagaagaagacaagaatgaatttatagaggaagcagcggatggcatatactttcctgaagatgatataactccattagaatggcttaagcaagtcactgaacaaattaaaaaacatcttaaaacaacatagttagagaaaaagagccctcttataagaagggcttcttttattaattcaatttcgctttcgtttttggtccgtaaatgccgtctggcttcaaaccatacatgagctgaatcgtactgaaacgttcagccgcatttactgatgtaagtgtatttgaataaattgcagaaaaaccctcctcgtcttgagaagggctctgacttatacttctttttctctaaatcagtccgaagcaaaaaactgatgccgctcaacttttcaatctgcccctatgcttttcttttgctttttgttttctgattaaatatttttgttcctttattttttctctttattttctattcagttgttttttcttttcttgtttcaagctcctgttttatcgctttttatgccttagttgatatcccgatatttttcatctctttagaagcttgtcgttgcaatctttttgggtttaatttcttagattttgctttaacacaaacctcttcttgtcagtgtgggagagagtctgtaaaaaaggaaagggtctccgcttattttaacaacacttcaagttttactttggttcaagcgcataaattccatcagcttttaatccattcatcaattgaaatcgaattactgcattcgctgtcttcgctccatatgcaccatcaatcccgaagttccttcgctataatgaagggcgacagcgccgttcgaatctgttttaagctctcccctcggattttaatgggttttcaactttaaaaaaccggaagacaagaggaaggatgctttcttgccttcagatgaagagccccctgaatcacttctttatcatcgacggcaaaatgatagcttgtcgattcgctgttacccgacatataactgatttcattggcggccgcatgcgtcatttcctgtattgtgaatgattttcggagtgccgctgtatttgccataaaaaactaaatattccgtttttcaaatacaaaaaaacagctggattaaccagctgctgatcgttatcactttagccgttcagtgatacgaaatttctgtatttctctgaaatgaacaggtttcggcaaagaccgccgccttaaaggcgatgtttatctcccttgcagtatacagtgaatgtacttcaaaatcagcccaaaaagcagctccgtcctcaattcgcccctcgatgaatgatgacaaaatcaataaataagcattgtcggactcaaaggttccggctcagctgtaaaagtatcaagtaagctcgcgaaaacaggtgcagctaaagtggataacgtcttggaagccggagaaaaagcggctgcaaaacatgtaaaaaccggggttgaaaaaggaaaagactatatcaattccgtttcgaaaaataagtacgaacccgcacttgccggaatagcacaggatattgaaaatactcataatgtggaaaatactcctttgttgaaaagtattattgaagagcagaaagagagtgtgctcaataaatctgtgacttcaaattttagtacaggaaaaagcaagtataccgccggtacaatgaaacatatttatcatggagaagttaataaacgcggtaaagcagttggctaccaccatgaaagcatgatgggcgggaagatataccaggtacagaaaagaaacctgacaaaaatggagtgtatatggcgaaagttgaagtcgggtctgtaaaaaagatagcggattcaagtttctttccaagagaatggaaccgcgctgatgtattaaaagcaattgacgaagcttatcatactagaaaacaagtacgttcaaataagtataggggaatcacttcaacaggaattaaaattgaaatgtatttaaatagtgacggaacaatagcaacagcatatccgttatataaaaaataatcttaaaggtgaccgtgacacatgaaatattcatacaggtttgataaagatccatttggtgatataaaaatagttttaccagaagaaatcagtcttttctctgacttcattgaaaatattacaacaatagaacaaactgatgagtatatagaatacattcagaatgttttaaatgggatacatgaggattttgaaattgatttaaatgggataagtgtattgataaaaaaagatgttaccgatgttgaaaacccttttttaatcgatgacccttataaaaactcaatagaaacagaccaatttaaagagttgttattaatatggagaaataaaattcctgaggtatttaaaggttaagtacattcactattcttcgcggtgaaatttgagtaacatgtcagacaccacttgccgaaaaggtcggaaagtatagttctgttctgagtgatccaaaaaacattagtaaaataaaaaaatggctctctaattctgataatagacctcctaatgccttaaacaagttacagacaaataaaacaacacattgaattcctcaagataaaagaaagcccttctcataagagaagggctttatctatgttttcaataggatagactgtcttcagtccatagaaaagcacagcgagattgctcgtagtcttccgtaaagtacgttcctttttgtcgcgttttcctgttctatttgcggacatattaccgcctccattcggttaagtcaccgaaataaaaatcgcttccttgtcgttggtaggaccgctaccctgcgccttaatacgactaagtcaacgcaataaaaaacggctagaaacgttgatataacgtctctaaccgcagtgtatgattccgactgggctcgaaccagcgacctctaccctgtcaaggtagcgctctcccagctgagctacggaatcatgatatgtatgtgttgctgggtatgttgttgtctctctgacatttataattatatatcctgatttctcattcgtcaacactttttttatctaaaataaaaaaagggcgcgtcgcaaaattgacggcgcccttttcgtttatgatctcacttggacaggggttatttttttcaatgcctgttcgaagtcccgctctaaatcttcggcgttttcgactccgacgctcaggcgcagaaggccgtctgtgatgccgcgtttctccctctctgctttcggcatggcggcatgcgacatggctgcagggtatgagagaatggattcgacggcgccgaggctgacggcaaataccggaagcgatacgttttcgaccagctttttgacggcttctttgctttccaattcaaaggacaggacggcgcccgctccgctcgcttgccgtttatgggtatcggctcccggatgtccggcaaggccgggatagtaaacgtttttgatggcgggatgtccgtcaaaataggcagccagccgctcagctgtccggctcgctttttccagtctgacctgcaatgtttttaagcctctcaatacgagccagcagtcctgaacgccgagcaccgctccaaatgaattttgcagcttatacagctgattgccgagctcttcatcttttacggcggcaaggcctgacagcacgtcactgtgtccgcttaaaaatttcgtcgcactgtggagcacgatatctacaccgagatcaagcggacgctgcagagcaggcgtcatgaaagtattgtcaaggtatgtcagacagccgtgatcctttgccagtttgacgacgcccttaatatccgtgatgccgagcgtcgggtttgacggtgtttccatataaatggctttcgtgttcggccggatggcgcgggcgaccgcttctgtgtccgtcatatcgacaaaggtatgttcgatcccgaaacgggacagaacctcagtcaccatgcggaatgttccgccgtacacatcctccgtgacgaggacatggtcgccttgggataagagcagaaacgccgtcgaaatcgccgccataccggagctgaaagcaaagcctctcgttccgccttcaagacctgcgatcgtttcttcaagcgctgttcttgtcggtgtgcctgagcggctgtagtcatatgtcccgaattcttcaaatgaagactgatggaatgtggaagcatgctggatcgggacgctgacggctccggtggctccgtctgttttaaatggattgtgcacgagctgggtttccagcgtccaattgtgattactcatatgacacggccccctcttttacttgctgtaatgcctgctttacatcccgcttcaaatcttctgcatgttcaatgcccactgaaaatctcagcagacggttgcagacgccgtttgcaatacggatgtcttcaggaatatccatgtgcgtctgtgtcgcggggtatgtaataaagctttccaccccgccgagactttctgcgaaacagatcgttttcagcgcctttaaaaacggattgacccattcctctttttgcagccggaaagacagcatcccgccttttccgggatataacacgtcggcgatttcttcttcctgttctaaaaattccgcaagttcacgggcgttttcttcatgacggcgcattctgagtccgagtgttttcatccctctcattaaaagccacgaatcaaacggcgaaagaaccgcgccgatcgcattttggtgattaaacatgatctcgccgagctcttcatcctttacgacagccagaccggcaaggagatcattgtgcccgcctaaatattttgtggcgctgtgaatgacgatgtccgctcccagttcaagcgggcgctggagcaccggggtataaaacgtattatccacaatcaaaagcaggccggcttctttcgtaatccgggcgattttttcaatgtccgcctcctgcattaacgggtttgtcggtgtttcaacaaataccgctttcgtgttttccgttattttggagcgtaaacagtcttcatcggtgaaatcatcgtaaataaagcttaagccgtattttctccattcgttttcaaacaaacggtacgtgcctccgtataaatcggaggatacaatcaattcatccccgcttttaaataaagccataatcgtttgaatggctgccattcccgagctgaaagcaaagcctctcgcaccgttttccaacacggcgatagcgtcttcaacgagctggcgtgtcgggtttttcgtacgcacgtaatcaaaacctgtagattctccaattcctctatgtcggtaagcggtggacagataaatcggcggactgaccgttcccgttgcttcttcgcttctatttccgatttgggctaattttgtatcaacatgctgcgtcatcagtaagcaccatcctttttcaaaaataaaaaagccccctcttcataagaagaaggagcttttctcttcctcttatcttccaagcatgtgaatcgcttgctggatttagcaccttggcactttgccttcccgcggcaaagcaaaccggttgctgaggtttcaaagggccagtccctccacctctcgtgataagaatattgttttgtattttctgattgttctatattaacgcactataaaatgaatttcaataactttttatttatctgaactctcgcaagaagtgcatctgaagaaagaaatttctaataattcatggtacaataggaaaaaaccatcaagacaagaagcggcctggaggaatgcgaagtggcatcaaaaaacggaatcattcatgagaaaaaacttttctcccatgagcttgaagaggaaatgaccgttttggtctacctgcccgccaccttctcccccctgtataaatatcatacggtcatcgctcaggacggccatgattatttcagattagggagaatcgggcggcaggcggaagagcttatgtcaaaaggggaaattgaccgctgcatcattatcggcgtcccttataaaaatgtgcgggagcgaagaaacacataccatccagaaggctctaaattcgcctcatataagcgatttatcgcaaatgagctcgttccttttatcgacaaagaatacccgacttatcaagtcggatacggccgcaccatgatcggggattccctcggcggaaccgtttcgcttatgacggcgattgactatccgaacatgtttggaaacgtcatcatgcagtctccgtatgttgacgggcacgtgctggatgccgtccggcagtcggaggatctcaaacagatttccgtttatcatcaaatcggagaaaaagaaaccggcgttcacacgacagacggccaggttcttgatttcaccgcgccgaacgaagagctcaaacagctgctggaaagcaaacagtctgaatacacgtatgaaaccttcgacggggatcataaatggacctactggcagccgctcatcacgccggcgctgaaaaaaatgctgtaaccattcatttaaggagggaactttcatgaaatacggtattgttttatttccatcaaaaaaattacaggatctcgcaaattcgtaccggaaacgctacgacccgagctacgcgctcattcctccgcacctgacgctaagagatccgtttgaagcgacagaacaggaaatcgagcaggtcgtatcacagctgagacagacggcgaaagagtcgcatccgctcgttctgaaaatcacaaaatacagctcgttttctcctgtgaataatgtgatatatatgaaagcagagccgacggaggaattaaaatctctgagtgagaaatgctactcaggagcattatccggcgagccggaatacagcttcgttccgcatgtcacggtcggccagaagctgtcgtcagatgaacattccgacgtactcggacagctgaaaatgctggacatttcccacgaagaagtcatcgaccgttttcacttgctctatcagctggataacggctcatggactgtgtacgaaacatttttattaggcggaggagaataactgcttggaatccatcatcgcaaaaactgaaaaacagctaaacgacgcttttttcgtcagaaaagaggtctttgttaaagaacagcacgttccggaagaagaagagattgatcaattcgaagacacgtcagagcatatagtcatatatgacggcggccagccggtcggagccggcagatggcgcttgaaagacgggcatggaaaattagagcgcatctgcgtgatgaaaagccatcgttctttaggcgtcggagccatcatgatgcaggcgcttgaaaaagcggcggcagccaagggtgccgacagctttatcttacatgcgcagacgcaggcggttccgttttacgaaaaacaaggataccgtgtcacatccggcgaagaatttctcgatgcgggcatcccccatctggaaatgataaaggaacacaaacgataaaatcaaaagcactcctgttatatggcaggagtgctttttttatgaaaataatactatttcatgaattttattgcattttatggaaagttaatgtatgtttagtatgcgaagtattacaattcatacaaaaagtacaattcatatttcggagggataaacatgacggcaccaaaaggaaaacacatattcgggactgttaaagtgggtacaaaaggacagattgtcattcctaaagaagcaagagatgttttcgatataaatccgggggattcactgcttatgctcggggatgaccagcaaggtatcgcacttgttaaacaagaactctttttcgagtttgcaaaagatattttaaacgctaagcaaatcgatgaagatagcgaggatgagtaaatgcacgcgattgagctgaggcaattaacgaaacattataaagaaaccgccgccgttgaccgtcttgagttctcagttgagaaaggggaatttttcgctttactcggtgagaacggagccggaaaaacgacattaatcagtatgctttgcggactcctttctccggatgacggtgatgcatcagtgcttggacacagtattttgactgatttggataaaataaaaccgaaattgaatatgtccccgcaggaaacagccatcgctcctcatctaaccgtgcgggaaaacttagagtttatagccggagtctacggaattccgaaaaaagaagcaaaaaaaagaacagatgagatgctcgaattgtttcaattaaaagagaaagaaagagcaaaaacaaaaacattatcaggaggaatgcagcgccgcctcagcatcgcaatgggaatgatcaccaagccggatatttatttcttagatgagccgacattagggctggacgtccgttcacgccgcgagttgtggaaaaatcttgaggcattaaagggtgacatgacgattattttaacgacacactatttagaagaggctgaagccctggcagatcgtatttgcattttagaaaatgggactttaaaagcactgggtacggcggaggccctgaaaaagcaaactcattcagctacatttgaagatgcctttttagcgatttgtgacggggaggcgggtctttatgcttgatttcgccattcgcaaccgcaaagaaatttttcgtgaccccctgtctattatccttggaatcgcactgcctgttattctattgtttctgtttacggcgattgaaaaaaatgcgccgcttgatacctttaaaattcagcatttagcacccggactcattgttttcggtttcgctttccttacgatgttctctgcattgctgatcgcaaaagacaaacagaccgcccttttgacccgtttgtttgcttcccctttaaaaacagccgattatgtcatcggttatgcaatgccgatgatgccgttagccattttacaaatcgtcatttgttttatcgcagctgctgctgccggtttatccgccgagtggatgaatcttctcgcaggtatcgctgtcttgctgccgattgcgatgatgtccgttttcttcggtttatgtttaggggctgtgtttacggacaaacaaatttcaggtatcggaacgatttatattacactcgtgcaatttctgggcggggcttggatggaggtgagcctgctcggtgacacattcaaacatatcgcttatgccttaccgtttattcactcgatcgagctggcccaggaagtcataaccggagattattcttcctttcatcagcatatttggccgatagcgggatataccgttttggcgcttgcacttgctttcctcagttttatgaaaatcaggaagagataaaaaaagccggcactccgtaatgggagcgccggtcttctttattacgtttctttcagaaggtttatcgtatgcggcagcagacgatcatcccccggactgccatggcccggaacgacaatgctgatgtcctgatatcttttcatgactttgcggacggcgcgcggccacttatccggataaaagcccggagtaggcacgatttcctttgtttctaaagccttgattaagcaaccgccgaataagagcttatcctcaggcagccagacggacatattgtcttccgtatgcccttttcccggataaaacgtttcaattttcatatcgccaaactgcagctttgtcacgtttttcaaatctccgagcggccggtcatatccctgctctcgggccaagtcggcggtcagcttcgtgctgtgcacctttacgccgtatttgtacagggtgttcagcccgccgatacgatcatcatgggcgtgtgtcacaatggcatcggtcatccttttgccgggaaaccgcttttttatttgtgtcattaattgctctgtgagactgtcattccacggagtatcaatcagtacgattcctttggaagtctcaagaagcaatccgttcgcagggacgggacttccgtctgccgtaccggtgcttgtatgcatccaaacatgcggcgccagctgtatgagagtgacatcttttgctgcggggccctccgcagcgtctgccggtttcattccggcagtaaagaggccgaatagaaataaccccgcaattcataatgaaagctttctcaaattgaatcattcctttccgcatctttcatatatacgactcaaaaaaacccggatatatccgggctttttcacacgtattgatttattaacctgccttttcccatgatttgcggcagacgggaaagagagcgcttacgtttttcctcatgtactttcttttctgcggctgcggtgttttcctggcggcgctccacctctctgtacaccctgtcattggcgagggcggccgctttcgtaatgctggcgtaatcaggcttataacccgctgcccggtttgcgtattgagaatactgctggttttgaatccgtcctgcataaatcatatgtacccctccccttcgcttttcatttcccttaatcttactttttgaaacgctgttcttttgttatgatattctttgtctatcaaatggatgaacaccttttaatgggaggacccctttttgaaatgcgcccgactgaataaccgaacgatacatttacatacatattctagagaacattaccaattcctttttgaagaagctcagaaaggaaatattttttgcgcacattgtgagcagcccgtcttgatgcggctttcgattttagagcagccggcattttatcaccggcaaaagggagacttcaccgcctgtgaaaaagcatgcgcggccgaggaaccactagcggagaaagaaaaagaagagtataaggaagccggcatgttccgcctgccgaaaggaaaagcgatttcagagaatccgaaaccgatcgtctcagaatggaaaagcccgaaaaaagtgcctgcggccgaaccgttttcaccaacatccgaggcggctgatacatctttgttccccggcatcggcctgaaccgtgaacagatgaaggcagttactgaaacggacgggcctttattagtgcttgccggagcgggaagcggaaaaacaagggtgctgacagcacgcgccgcccatatgattgaacacctcggcatttcacctgagaatatgctgcttgtgacctttacgacaaaagccgtcgccgaaatgaaagagcggatggcaaatgagtacggtctggcagccggaaaagtctcccgtctcgtgacaggaacattccacagctttttctataaaatactctatcattatgattcttcaaaatggaacggcagccagcttttaaaaatggagtggcaaaaagagcaatatgtgaaaaaggcgctctatgaagaaaatttggatgaaaaagagtttcccgtcgaccaggcgcttcagcttatcggctgctggaaaaacacgtatctcccccatgagaccattccgcttgcggacgactgggagaaaaaagtgtacaggctctacgaacattacgaacggcagaagcgggaaaaacggcaatttgattttgatgacatggcccaaggctgttatgaactgtttcaaagccggcctgatattctcgcgcagtaccaaaacagattttctcatattttgattgatgaattccaagatatcaatcctgtccagtacaacattatgcaaatgatcgcaagccctgagaataacctgtgctgcgtgggtgatgacgaccaatccatttatgcattccgcggcagcagcccgtctttcattcttgactttcaaaaggactatccggcagcaaagaccatttacttaacggcaaattaccgctcgccgcatccgatcgtctcaagcgctcatgccgtcgtaaagaaaaataaaaaacggtatgaaaaaacactttctgccgtcaaagacggcgttcacaatcccgtgatgttttttccttacgatgaagaagaagaagcgaccatgatcgtttcggatatgaaagagaaaattcaaaacggggcgagtcctgacgattttgccgtgctttaccggacaaacagcgccggacgggccatttatgaaagactgcaccaatcatcgattccttatcatgccgaccggggcgtgcagacgttctacagccgcagaatcgtacgccagatcctcgcctacttatatgcgagtcagaatgaagatgatccggatgcggtgaaagacctgctgcccgccttatttttaaagcaatccgccctgcaaacgttaaaggcgctgtcaatcacggaagattgcacgatgattaaggcactgacgaaactgcctgacttgaagccttttcaaatagagaagatcaagcagatcgttccgtttttcgcaagcatccggacaatgaagccggttgaagccatcacctttgcagaaagcaaaatgggtttttccgagtatttaaaaaaacggggcaatgagggaaacaaactggaaaaaggctctgatgatctcagggatgtcaaagtggccgcaaaaaaattcaaaaccattcccgattttcttgcgcatgtcgatcatatgcgcgccgctgagaatctgaaaaccgatgaaaacggcgtcgaactgctgaccattcaccgctctaaaggtcttgaattcaatacggtctatattttaggcgcggctgacggctcgatcccccatgacttcgcacttgagacggcgagacagggcgatcccgctccgctcgaagaagaaagacggcttctgtatgtcgcaatgacaagggccatgcagcatttatatgtatcttgtcccgcgtacaggcggggaaaaacagcgcgcagctcaagatttctcgagcctcttcttcggacggacagacggagcgcactcaggatataaagaacccggcagatcactgccgggttcttctcacataaaaaggcctttttagcaaggccggctgacgcctatttattgttcagcattttagaaatggtgccaaaatcaagtttctctttaccgcttgtaatagattgaacgattttgtcttccaattctttcggaacacgcttgttagccagctgggacaccttctgaatgacgcctctcaccgtgttttcatctttgaaattggcattttgcaatgatcctgcaaggttcatgacatccttcatgctgacgcctgttttcttctcaatatttttgaaaaattgattatccatggtgtgcctccttttgtggagtaatacgatattgtatgaataaagagcggaacatgtgcccgtaagacaaggaaaaaattccgagtgccccgtctctatactccttcatacatcagggaagcacgggactgaacggtcccgcgcttatccaaggtcttgctaaggtttagccaaaaaaggatgcaccgacaatgatcagaaggatgaacaatacgacaacaagaacaaatgttgagccgtatccgcctccgacatagccgcctccgtatccgccgcagccgccataaccgccgtagccgccgccgaatccgccatatccgaatcccatatctaagcacctcctttactctctatactctatgtgagccgacttgtttggcttggataaatgcatagggccggtgcggatttcgttcattttagtgagaatgctcatttttcttcagttttgcttctgtttcggcggcaaacacatctatccattcctcaaagcgcgatcccgcttcatcaaactcagacagctgtttttcaatagataagatatatttgtcatgctcccgctggttttgattgtgccggcggtatttaccgtttatgaatgattcaaatatattcataacatcccctcctcctatgatctatgccaaacaggggccggcgttcggcaaaaaacaaaaaaaccggaagctccggttttttagaaaacggctatttcggttttttcttttggccgcagccgcagccttttttcttgatttttttttcgtaaggctgatgcacagttgatttgtatggagaatgttgggaaggtttgcttgattgattcatggtgatccttcctttccttatgtcatatatgccagtttatgccgaaagtgacggtaagttgctggtggaaccgccttattcctgcagaagacgggaaaccgcagcttcaatgatcccggccgcgccagctatggctaacagcaaaatcagccattgcgcagcctcgggtatcacaatctgcgccgcaattaaaaaggcggcacaccacacgcccgtacaccagtagcagctgagaagttcaccgataaatgccctgatgcctttcccttttatgacaatgtaggtttctgtcgtgccgtctggtgcggtttctgttttttcctcgtgaaaaaggctccgaagcggcgccataatggtgtcaaatacgaaaagcctggccagccggaaaacggcaaacgataacagaataaatgaaagccaattgataaccacctgttcactccttttcaaaacttgacctctttatacatatgcgaaaaccctgatcttcatgaatcgcaccttgtccggtaaaaaaataggtgcggtttagttgtttttcttattccgctcggcgtttcatttgcattatataaagtatgaatgagaaaggagtgaaggttatgtcgtttgaagaaaaagtcgaaacactgcaaccgcaaatatacgaacaattatccaacgaattcgagcagacgatcgaagtgattgattgcgaaaatgtcacaatagatacaacacatataacggccgctctttctatacaagcctcagttactacggcgattatccttgcgacacagctcgcgatcgcagatgaagacacagccgaccaaatagcaaccgaactgctgatcctggatgattgccaaataaaaaagaggaccgtcattcaagtcctgaacagccgcaatattaaaatcacactgactgcagacgatattatggcctttgtacaaattttgtttcaattattaaatatactttttgctgaactagacatcctttaacctttcttttcaaatatttaaatagaggtgagaacaaatggcagataacgaaaaattcaaaaaagaactcgaaagtctaccagaagtggacccgcttttaaaagtgcttgtcagcaatgtcttcaaaaagcacggcgtaacaaaagataaaatgcgggaaatacctgatgaagaaaaagaaatgctgatcgcattagtcaaagacatgcaggcgaaatcacaagcttttcttgaaagccagaaacagaaaaaagagcaggaaaaagcacaagaacagcagacaaatccgaaaacccgcagagaacaattaatcgaacagctccggcaaagacgccaaaattccggtcaataactaaaaaatagtgatttttatcaggataaatgcctgagtcaaagtaaggggccggctcatttaataatagtaaaagaaaaggaggaatagatatggaaagcagaccatactcttgggttgcacttgatcccgaatgcgaacatccgcgagaagaaaaagaagaaaaagaaggcagaagatgcagtgtttgctgtaacggaaacggattcggcgaagataatgccttcatcgaccaagacttagcccaggcgaatatcaacaaacaagtttctgaagaagcgattattatcagagactcttgcgatattaacgtaacatcgacagacgttcaggcagtcacttccgttgtaacagcgcttaatgcagcagtcgtaacggccactcttacttcaatcgctgacggagtcatcgctgaattggtcgcacaagacttacttcagctaacagctaacaaacaaatcaaccgccaaaaactgctcatcgaaaactcccgcggcgtaaacgtgacaacagtagacgccgatatcgcaacgttgatttcaacagcgacaaatacactggttgccatcttagtcatcacccttgtcctctaaaaagaaaagcagagctaaaaatgctctgctttttcttattttctccgcatatgatgaatatatagacgttcacccacaccaagtgaggctcgcgtacatatgttgttaaagacaaaagtcaaataccctaaaagaaggagctgaaatccatgagctgcggaaaacaccatggccgagatgaaagttgtgtatgcgatgcagtcgagaagattttagcagaacaagaggctgttgaagaacaatgcccgactggatgctatacgaatcttttgagcccgacgattgcaggtaaagacaccattccgtttctcgtatttgataaaaaaggcggattgttctccacattcgggaacgtcggaggatttgcggatgacagccagtgctttgagtccattttctttcgtgtagaaagactatgcgattgctgcgcgacgctttcagtattgcgccccgtagatgtgcacggcgacaccctcagcgtctgccatccttgtgatcctgatttcttcggtttagaaaaaacagaattttgcattgaagttgatctgagctgcttcagcgccattcagtgcctttcacccgagcttgttaaccggcctgcgccgcacaaagagaaaaagcatcacggatagtcattgattcgcatctttcctaaagaagaatccccttccaaccttctattacagatgcaatcatcagcccgcccggacttccgggcggctgactctccgatatcgtttaaaccggtaccatttaaaacgtgaagtcaggagggatattatgagcaagcatacaacatactgtgtgcgtgaagcggtagaaaatattgaagacctgcaaaatgcggttgaagaagattgcccgacaggctgttattctaaacttttatctccggcttatacattaggcgatacagtaccgttcgccatcttcacctcaaaatcgaaaccgttcaccgcattcggaaacgtcggcgagctggataacggtccgtgctttaataccgtttttttcagagttgaaagggtctgtgacggctgtgccacattaagcctgcttattgcttttgacgagcataagcacattcttgattttacagataaagactctctctgcgatgtattccgtttagaaaaaacgaactattgcgttgaagtcgatctccatagcttctgcgccatcaattgcctgaacccgagactgatcaaccgcacacattcttaaatcaaaaagcataaaaataagctgccggatgaaagcattcaggcagctttttgtatggttaaaatccaagcggatgcagcgaggtaatatcgtctattgcgagttctgccggcgctccgttgcttgtcgtccgcaggaagatcgcattattttttctgccgacgattacgcctctgtaggttttcccgttggcttctatcagacaaagggtccgcggcatattatgcggcagcttcgttaagaaatcaattttttcaagaatggacattctgctcatcggctttttcacgcgctttggcggaaccttttcctctggggcggcattgtgaaccgcttcaggctctttttcagcggcatcaggctcttttttagcggcgtcaggcttggcagtgtcctgctccgcttgcgccggaacttcttgaacggcttcttctgcgcggctgtgctgttcaggtacttgcttttctggctcgacagccactgctccttcaggctgagtttgacattcttcctcccgctttccatgcatcggctcttcttccggcggctgaggcgctttcctttttttgattaatatgtcctgcattgatgattgcgtgtctgaataatccgcctgaacaatatacatgagcggttttttttccgcgtttctgttttgttttgacatcttcatccctccgattctgtcatgttttatttatatgacggaatgattaaaatcagaagaaagaaaaaagcaatccccgaaagggactgcttgttatttaacgtgcggtaatatggaatcctgaatcaacgtgaagattttcgcccgtgatgcctcttgacaggtcactgaacaagaatgcagccgtgtcgcccacttcttcaggtgttgtcgtgcggcgcagcggcgcgcgctcttcaatttctttcaggatggagttgaaatcactgattccttttgcagacagcgtgcggatcggacctgctgaaatgctgttgacgcggatgttttcttttcctaagtcagccgctaaatatctgacgctcgcatcaagagacgcttttgccacacccattacgttatagtttgaaacgacgcgctctccgccgaggtaagtgagtgtaacgatgcttccgccttcagtcataatcggacgcgccgcttttgcgaccgctgtcagagagtaagaactgatgttatgcgcaagcaggaatccttcgcggtttgtatttaaatattcgccgacaagctcttctttgtttgcgaacgcgatgcagtgcgcgatgccgtgaatcacgccgacctgctctttaatgctcgcaaagcaagtttcaatctcagcgtcatttgtcacatcacacggaaggatgatggaatcatttctttctaatgtagccgcaaggtcatgaactgatttttccaagcgctctcccgcgtaagtgaaaatgaggcgcgctccggcttcatgcagcgaacgggcgattccccatgcgatactgcgtttattggcaacgcccatcacaacgatgttgcggccttcaagtgagaaattcatatgtataaagcctcctgtaatcgtcttaaagacatagttttagtacctgatcttaatttttatcatatcataaccttgtccagattgaaagcatgggaaaaagaccgcggatgttgaagcggtctcttttttatctcgtctgcagactgttccttttaaaggcaaaatgattggtcgggccgtgtccctctccaatgccgagcgtatgttccacggcttcccgcacaaaattgacggctgtctcaaacgcggtctgaatgtttttcccctttgccgtttccgccgtcagcgcggctgcgaacgtgcagcctgttccgtgggtgtgtttggtgtcaatataagcgtggctgatttggataaaagacgaaccgtcaaataataaatcaacgatcctcccctgttcaggctggtgtccgccttttatgatgacatgctttgcaccaagcttgcaaaggcgttcggccgcttttttccggtcctcaaacgtgcggatttccattcccgtcaatacctcagcttccggaacattcggcgtcaccgcatagctgcgcggaattaacagctcttttaacgcggcctgagattcctcacgcagcagggaagcgcctcctttggcaatcatgacggggtccgtgatgagatgatcaagcccgtactgatccgttttttccgcaatttccgcaatcatttccgcgctccacagcattcccgtttttacagcgtcaggccgcaaatcttccgccaccgcgtcaatctggctgcccagcgcttcccgggtgagcggataaatgccgtgaacgcccaaagtgttctgggcggttaccgctgtaatggctgacatcccgaaaacgccgagctcctgaaaggttttgagatccgcctgtataccggcgccgcctcctgaatctgatccggcaatcgtcaatgctttgcatatgctcatgatgtttttcgctcctttcgcattatccgatccatttatgataaaaggatttcgctctgctgatatcacttgtgccgtgtattaatgctctgccgtcacgaaacagtaccatcttgaaattgtctttgcaaaacgaaattaaatacgggttggctgaaacatcaagccctgtccgtctgagctgtcccgcaagtttttgcagatcaaactgttcagagatccccgctctgatctgcaccgtgttccgcccgcacagaaccgccgcttttgtctgattttcataggataaaaacggataatcgttcgtgccgcagcttgggcaatcagccgacctaagacgggcgacgtttatttctgaccgttcatttttccataaatcaaaggaacggagaacatgctcgatagatccgcccgttaacagcttcagcgcatctgctgcctgaaaaacggccgtctgcaatacagccgggctgatgattcccgccgtatcgcatgtcataccgcctaaaggcaatgtctcaagcagacaatgaaggcacggcgttacaccgggaatgacggtaaaagagagcccgtagctgccgacacaggcgccgtacagaaagggaatccctttctgcacagccgcatcattcacaatcagcctcgtttcaaagttgtcggcggcatccacgatgagggaggcgccacgaatcaatccgggtgcgttttccgcagtgacatccatgacaaatccctcgacatctacatcactatttatagatcgaagccgtttttcagccgccgcggctttcggcatttcctgtctgacatcgtcttcggtataaagctgctggcgctggagattactccactccacataatctctgtcagcgatcgttaccttcccgactcctgctctgacaagcatctccgcacttgccgtcccaagcgcacccgcgccgataatcacggcatgagacgaccggagcttctcttggccggagagaccgatcggctgaaacagctcctgtctggaatatctgtccgtcataccggaagaccgtctcgcggactgcttgcagttccgtaatctttcaccggaattctcccggcttcataagaaagacggcccgcttctacggcaagcttcatcgccctggccatcttgaccggatcaacagcgcctgacacagcggtatttaacagcacgccgtcagccccgagctccatcgcgtaggcggcgtcttttgaagatccgacgccggcatcgacaatgaccggcaccttcgcctgttcaatgataaaggatagattcagcggatttaaaattccctgaccggaaccgatcggcgaagcgcccggcataatggcatgcactccgagctcctcaagacgtcttgcgagcacgacatcgtctgacgtatacggaagcacgataaatccctcttcgagcagctgttctgatgctttcagcgtttcaaccggatcaggcaaaagtgaccggctgcatccgatgacttctacttttatcatgtcacaaagccctgaagctttggcaagccttgcgattcggaccgcctcttcagccgttgcggcgccggccgtattcggcagaagcgtgtatttagacaaatcaagctgttcaagaaagttaggctgagactcttcaaagatgttcatccgccttaccgcaaaggttaaaatatctgattccgagacagccaccgcctctttctgaatctcaaaactcggatattttcccgttcctaacagcaatcttgactgaaactgttttccgcctatcgttaacatcctcatccgcctcctacaaaatggacaatttctatgacatcgcggtcacacaaactcgtattttcataattctttttttcaatgatttctttatttctctccacaactacgattctttgatcaagctggtacgattcaagcaaatcctgaaccgtcccctcatttcgattccaatcaatttgttttccgttcagctgaaggatcatatatgaacagcctccttgcgatcaattcgaaacgcttcttcccattcctttttaatctgtctttccaggatcatatcccgcaccatttcagccgttgccggcgccaacaggatgccgttccgaaaatggccggcagcgaagatgatgccgctgtcttcaggatgccgcccaataaacggttttccgtctcttgttcccggcctgagacccgcccaaaaccggtctattttcatatgttcgatggcgggaagcatggttttcgcttttgcaatgacggcctcaattcctccgatgtcaggcgtatcgctccagtcgccgtgtttcatcgtggcgccgatgacaagccggccgctttttctcgggacgacataacaatgatcatggtaaagggttttgatcagcgggatatcgtcattccacacggaaaggcattctcctttcacaggaaaaaaaggctgtcccaagccgagctggctgaaaaaccggccgctccatacaccgcttgcaactgcgactttgtcagcataaacatccccgccggacgttgtgatgcaatattctccgttcacccgttttacggaggtgacttgtgtatgctcatatatatcagcgccatagcgccgcgctccttttgcatacgctttgcagacatagtacggctcgacatggacatcgtcttttataaaacttgcgccgagaatgtcttttgaagcgtaaggctctttttcaagggcatcttccgctgaaagccaagtgacggaaggcagatcatccatcttccgcagacgggcgatatcttcttcggtatacgccagtttaagcattccgccgttatggcgcctgatgtcaatgccgcaagcttcctcaagctcttgccccgccgcttcatacagcctttgactgtgcatggcaaaatcaaaaaacgcatcccggttttcacattccgcatgagcgcccagcattcccgcggcagcgcttgtcgtttttcggccgacttctccggcttcaagcaagacaacgttctgctgcgtcttcgccagctcataagaaatggcgcacccgataattccgccgccgatcaccgccgtatcatagtgcttcttcataatcggcctcccttaccgcgcgtgcataccgctttgccgcctcctcaggattttcagctgagaaaatccctgacatgacggcaattccgtccggtttcgcctgctttgtgtgtccgatcgtctgcagtgtcattccgccgattgcgatgacggggatggaaagcgtgcgtttgatctctgaaagcaggctgatgcctcttgcttcaagtccttgtttacattcggtttcaaatacatggccgaacaccacataatccgcatcttccttttcagcttggatggcttctttcagcgaatgaaccgaacgtccgatatgaagatggggaaatctgcttcgcacctgctttacggaaaagctgcgggacggaagctgaacacggtgtatattggcaaaaagcgcgatatccgccctgtcattgatgatcaatttgtccttatccgcaccgccctttttcaaaagggtcaaaagctgcatgatttctcccgctgttttatcccgctcacggatatggataaagcttacttcgcgctgaatcgaaagaatatcctcggccagctcggcaacgggtttgcgattatcagttaccgcgtgcagctccaaaagattccacctcttttccgcccttctcggaccagccttctttttgataggccattccccaaaattgatattcataatagcttgaaatcacaaaattctctttcattttcgcgcggatgtcctctgtgctgttttcagcaatctcgtcaaaacggctgatctgttcttcgacttgctgtctgaaccagtctccgccgtatgtaccgatccatttttcataaatcggatgctccggtttgcactcctttaagtgctcgccgacttcataataaagccaataacagggcagaagcgcagctaatatttctccaaaattgccgctcatcaccgatctgtacatatgagacgtataagaataggcggtcggtgccggtttaaatgccgcacgctcttcttccgtaatccctaaaagctccgtaaactcgcggtgcagcgccatttccgcttcatatgtcccttgagcgtggcccgccatcctgcccgtcgtaaacaagtcttcggcatatgcggcgccgaacgcctgaacttttgcaaaatgcgtcaaatagtaggaatcttgcagcacgtaatagctgaaacgatctatcggcaggcttccgtcaccgattcccgttacaaacggatgaacaaaacttccgtcccaccattcggcagccgcctgtctgcattcttcagaaaatgtcattatgtcttcccccctgataaaataaaaaaaaccaccttcccgcatcggaaaagtggtttggaatttaaatggataaaaggaaccccaaaaaaataccgctccacttccctacgcaggtctgaacctgttcaagttatgagggtctaaaagtctcacttttatctcagcccttatgaaggacacccctagtggtcatacgattattgatttatttgttatgccttctatattatcacgaattgcaatttggtcaagcttcaaggatttttctcagttccgacacgtagttgcgcgagcccgtgacgatgagacggtctcctgttttcagccgcgtgtctccgtgcggaacgatgctgtccacacctctgaaaatccggacgaaaatcacatcgcccatcagcggaaattcccgcagaatgatgccgttatacgccgggttttccagattgatctgatataacgaagactcctcattcgtcaggaggctcatcacgcccggcgcctcaattaatgcgcgcaagagcgtctttgtagacagaaggatagaaaaaatactgatgccctcttctttcagttttgtttcatgctcaaccgagccgacgcttgcgatgatacgctcagtccctttctctttcgctattaaggcgatttcggcgttcacatcttcatttcccgtcgccacgacaagaatatccgttttgaaaataccgtgcgactcaagcgttccgggctcgtaatcagaaatcgtgtcaaccgaaaaaacggattccgcaagcgtttccccggcattttcctgatacacatggacgacccgtacttcatattcctcctcaggcaattccagcgtaaccggaagcgtcatttggttggcgccgataaatgtaatgcgctttttttcctgcggcgcactttgccgtttgtataatttcttaaagccgatcggtgtgatgatgctggcaataaccgcaactaaagtcagcgcgccggacatattggcgctgataatgtggagcctttctccgatcgtagccgccgcgataacaagcgacagcgtggacgtcagcaaaaagcccgaagcaaacacggttcttttgtcataccatttctttaagtaaaacacagggaacatcttgctgataaacagcgcaagcagaagcagcggaatcatcgttaatgttttcggatcttggaagagcgtccaaatgtccaatttcaccccgaccatgacgaaaaagatcggaattaaaaacccgtagccgaatgaatccagctgttccaccatttctttattcggagacagaagcgataccagaacgcctgccaaaaacgcgccgagaatattttccgccccgagagattccgataaagcgacaagcacgataatcagtgtgaaaatggctctcgtgccgatctgcacggtgcctttagacatcgactgcacaaatgaacggtgtttaaagatcctgccgaagaaatacagcacgacccccgcggcaaagagaatcaacagaagccacatatttccgctgtcttctccgtaaagagaagagaagaaagcgagcagaatcatcgtagccaagtccgcgataacggcgacaagcaggatgatctggccgatattggagttcataatccgttcttcctttaaagtcgggaccaccacaccgagtgatatcgtcgaaataataagcgtcattaaaaatgcgttttgaataaaaccggctaatacaaaggcataggacagcagcaatgataaaataaagatgccgaaaaagataatcagtgcggcagaaaacgtgtttggcgcttccttgccattcggaaggaattgttttttcttccctttctcaaatgaagaaaaatcaatttccaagccgcttaaaaacattaaaaagataaagccgagaacagacagcgtctccagccacgtgtctccctgaacgacaagattcaggccgctttttccgataataagccccatgatgatctccgcgacgacgacggggatgctgagcttaaaccgatgtaaaaggagcggcgtcaaaaaagcgacgatcagaacgacgactaaagatgcgactgatgtgtgttccattcgtaaatacctccttaaaacaagggttataaaagcccgcttaaagcgggcgaaaccttacttttttttaaaaacataacgcatattctaacaaggctgaacgcgaaaaaaaagtgataaggctttatttctttaattctttttttaatttgtgcaaaaacagcgtaattaggtataggaattagccccataataaataaaaaaccgttaataaggaggctgacacgaatggcttatgacatcatcagcgatatacacggatgttatgacgaaatgatcgcgttaatgcaaaagctcggatatgaagtcaaagacggaacgcccgttcattctgaaggcaggacgcttgtctttgcgggggatttaacggacagaggcccaaaatccgtagaagtgatgcgttttgtggcaaaagcatttgaaaaaggagccgtccgttatgtcccgggaaatcattgcaacaaactgtaccgttacttaaaaggaaaccccgtaaaagtgatgcacggactggaaacgacggcagccgaactgaaagagctgtctcccgccgacagaacggaagtctccagacaatttatccgcttatatgagtcagcgccgctttatgacattttacataatggcgatctcgttgtcgcccacgccggcataaaagctgacgatatcggtaaatactcgcgtaaggtaaaagaatttgttctgtacggcgatatcacgggtgaaacgtatcccgacggcagacccgtcagaagagactgggccgccgcttatgaaggcaaggcatggattgtttacggccatacccctgtaaaacgcccccggatcgtcaaccgtacaatcaacattgatacaggatgcgtcttcggcaatcaactgacaggctttcgctttccggagcatgaaaccgtctctgtggaaagctcaatgccctatgatgcttcacgatttcgcgaggatcacggaaggcaggcatgaaaaaaagcccgaaaccggcaaacggttcgggctttacatgtgttcaattaatgttttcatatcgtcaggcaccggagcgtgaaaaacgagcgtttttccggtcatggggtgtacgaatgaaagccgctcactgtgaagagcctgccgcgcaattccctcattttttccgccgtacagtgtatcaccgactaacgggtggccgaggtagctcatgtgcacccggatttgatgcgtccgccccgtttccagccgcagggctgcaagcgtaaacgcatgtcccgctttttccgtttgaaaatgcgtcaccgctcgttgtccctccggcgttaccatccgctcaataatactgtcgtgttttcttccgatgggcgcgtccaccgttccttccttctgcagcatgaccccatgtacgacagcgagatatcgcctgctgacaagcccctttttctgcgctgccgacaaaagagaatgggaaagccgatgtttggcgatcagcatcgcccccgatgtatccctgtcaaggcgggtgacaagatgaaccgttgattgcacgccgctttttcggtagtggctgatcactccgttagcgatgctctccgacgggtgttctcttgatggaattgaggagacatacggctgtttattgatcacaagcacatggtcatcttcataaagaatatcaagaggaaccggctcaggcaaaagcgtttcactcacatgctccttcggaaattcaatcttaagcacgtctccttccgctaacacggcgcggacggttacatgctctccgttcacaagcaggtctcccccgccgaatttaatgtcagcgagaagccgctttgaaatgccgagctgcgccgtatattcttttaccgtcatgccggcttcccgggcagtcatgttcatttgaataaaaaagttgtccaatccgtttcctctttctattcgccttttccgataaaggagtcctgcacccttttccaaaacggaaaaggacggaatcttgcaaatctgactttttcatttgccacacggcatagaatggacttgacatccttatgcagcaaggttaaatgatcaattgtgacttgaaagtcgacgtcgtttctcggtttgatgacacagttatgatgatcgggaagcaaaagcggcgagccgacagtcctgaacactctgttgttgatggatgccatttcagcaagctgaatcgccctgatggaagggtggatgatcgcgccgcctaacgccttattataagccgtgcttccggaaggcgtggacagacataaaccgtctcccctgaacgtttcaaacagctggcctttaatttccacgtcagcgacgaggctgccttctatgcttttgatcgtacattcgttcaaagccagataccgctcctcacgctcttcatcatgataagtgacaatcacctcaagaaggggatactccacggtatgatacggcgttttggcaatggccagaacgagtttttctatctcctgcggaacccaatcggcataaaaacccaaatgccccgtgtgaactccgacaaaagccgttttatcaagacggtcgctgtacctgtgaaatgcgtaaagaagcgttccgtcaccgccgacggaaataacgatttccggctctttttcatccaaggtcatatcaaaatcgagtaaatacgcctgtattttgcttttcagtgtatctgaaacctcgtctccttttgaagaaacggcaaatttcatgccattcccctcctttcctactggcggtctcccgcttttttctttcgcgagaacgcggcttgggcttcctggatttctccgcggatttctgacatttcttcatcgagccgggatgcggcttctgaggcccgctgcagcctcagctttactttttcgggaatgtttccgctgtatttgtaattcagtgaatgctcaatggttgcccaaaagttcatggcaagcgtccgaatctgtatttccacaagaacgtgcttttctccggacgttgtttgtaaaggatataaaacgacaaggtggtaagaccgatatccgctttccttatgctctgctatgtaatcccgcttatccacaacggtaaaatcttttctggcaaacagcatatttttgacgatctggatatcatcgacaaattggcacataatacgcagccccgcgatatcctgcatcgtttcaatctgatgaagcggtatgctttttcgtctcgctttttcaagtatgctcgccaccggcttcacgcggcctgtcacaaactcaatcggtgagtggtcatcttcatactcataaagggttctgacgcctttcagcttcacctttaattcttcaacagcctggcggtatggcgctagaaattgctcccattgtttgtcatccatcgtacatcccccaattccgaacctgttctaaagaaatacgtttttcactttttcttccatatctccgtagtttgcattatctttaatattttcaagaagataatcgagttcttcatgcagccctgaaagttcaaccgtttttccgccggcctcaaggaccgccggttttctttggtctaaggcttctttcagatccggccagatatgttcttttataatgacatattcaaaagagtcagctgattcaagtatgtatacaaaagcaaagtgatcggaatcaacaagcatttgacctgaggctttgcgttccgctccgcttaagtcctctccgcacttcaagcggagcgcgtcttctgttaatgatgcattttggatttcaattctcttttgcataatgttctccttttttaacaaagtacagcatttattttatcatatcaaggtcgatattgataaacgtaacctctaaagagataatgggaattatacaatttttcgtcctgaaaggaagactgtcatgacccaagaaatagaaattgaattcaaaaacctgctgacaaaatcagaatttctgaagctgagtgaagcactctgcatgaaagaacatgattttaaacagcaggtcaatcattatttcgacacgaaagatttttccctgaaacaaaaaaaatcagcactccgcatccgagaaaaagacggcgcgttcgttctgacgttaaaagagcctgccgcggtcggtctgctggaaacgcaccaagagcttgcggcatctgatcttgacgtcttcaagattccggatggccccgtcaaacgtcagctggaaggtctcggaatcaactcagaacacatttgctatttcgggacgctgtcgaccgcacgcgcggaaaaagaatcagaaaaaggcttaatcattttagatcacagccgatatttagagaaagaagactttgaattggaattcgaggctgctgactgggatgaaggaaaacgggcgtttgaacaattgctcaagcaattcggcatcccagagcggatcacgaaaaataaaatccagcgtttttatgaacagaaacaaaaaaaggtggaatgacacagtgaatataacgaattgggcggcccttctccagctgcaatcaatggcgctgcaatcaatctctcatacaagcacggcttcaggcggacaatcttcagaaagcccgcttgccaatttcagcgcgctgctcagccagtatacggacacagccgtccggcagcagccggaatcaggaattttaaacggcgtgcggaccgctcacgcttcttattcaccgagaattcccgtttcatccggttccgcggcagcttcacagaccgcttccccaagcataaagtctgcgaatgcggcttctgacatcagcaccggaaacttttcaatagacagcgccattcagaaagcggccgaaaaatacggagtggacgaaaagctgatccgcgcggttattaaacaggaatcaggctttaatccgaaagcggtcagcggtgcgggggcaatgggactgatgcagctcatgccttccacggcagaatcactcggggtgtcaaacccgcttgatcccgtccagaacgctgagggcggcacgaagtacttaaagcagatgctcacgaaatacgacggaaatgtatctctcgcgttagccgcctacaacgcaggccccggcaacgtagatcggtacggaggcattccgccgtttaaggaaacacagcaatatgtcaaaaacataaccaaacagtattacgcgtaaaccagagaggcttccttcgccctctggtttttttgcggagtgaaatcttacacatgaatgaaggcgatgtgatatgatatgaaatacaagcgcctgacagaaaggcactttgtttgtagaaataaaatgttattgctaaaatatacagtaactgaagatagtaaaactgaaagataaattcgcaatgggaattatgattcctattagccatataaaggagtagtcaacatgggacaatcgtttaacgcaccatatgaagcgattggagaggaacttctatcgcaacttgttgatactttttatgagcgtgtctcgtctcatcccttgctgaagccgatatttccaagtgatttgactgaaacggccagaaaacaaaagcaatttttaacccagtatttgggcggacctcctctttatactgaagagcacggacatcccatgctcagggcaaggcatctcccctttccgattacggacgagagggctgatgcgtggctaagctgtatgagcaaagcgatggatcaggtcgggctggagggcgatattcgtgaatttctgtacgggcgtctggaactgacggccaggcatatggtaaaccagtcagaagcggaggatcgatcatattgacgaattatcagcatgagcaatacttcgcccattgccacggacatccaaaaaaaccgctcgaaatttacatgtttgtcgaccctttatgtcctgaatgctggtcgctggagcccgccataaaaaaattaaaaatcaaatacggacgtttttttacgctgcggatcattgtttccgcgagcattacatcgctgaataagcaaaaacggaaaaaacaccttcttgccgaagcttgggaaaaaattgcgaaccgttccggtatgccctgtgacggaagcctttggcttgagcaggatcagcctctttcatcgccctaccttgccgcactcgctttaaaagcggctgaactgcagggaagaaaagcgggcattctgtttctccgcagcatgcaggaaagcctgtttgtttccaagcagaatattacagatgaagacgttcttttagaaattgccgaaaagacgaaattggatgttgaagaattcaagcgcgatctccattcgcaaagcgcggtaaaagcgcttcagtgcgatatgaaaatcgcggcggaaatggacgtcaccgtcaacccgacattgacgttctttaacagcctgcatgatgatgaagggctgaaggttcccggcaactattcttatgacgtatacgaagagatcttattcgaaatgctcggggatgaaccgaaaccttctgaaacgccgcctttggaatgtttcattgaatatttccggtttgtcgcatcgaaagaaatcgcactcgtttatgatttgagtctagaagaagttgaaaaagaaatgaaaaaactggcattcgccaaaaaggtcgccagagtggaagcaaagcacggtctgttttggaaatctctggccggcacccaggaggatgtcacctgttgtgatcattaaaaaaagctgattccttacggagccggcttttttttgtgcaaataaagaaaccgcgccgggataagcgcggtttcatatgtcttaacgacaacaaaggggatgggagaaatttttcacggtcaaacaaaggggtaatgtttgtttgtgatcaatttcacatccttatcatatcaaatcttgtcgagttttgacaagccataagattaatgttcatatttttgtcacaaaacataactgactgcttgttttcatagaatatatcaatgaaaaacaaggagggaaatcaatgctccgcaccgtattgatcatcggaatgattgtgtttttcttctttttaaacctgctggccatgatgcacatgctgccgatttacattacatctcccctgctgtttctgtccatattgtttgccttgtaccggctgaaccatagaaaaacgtttaaagggttttaggaaaagcctgcgcatcatatgcacaggcttttttgaattacgaagggttcactttcgaaagaagctcttccatttcattcagtttctcttcaaacattttgcaggccgcctcgatcggttcaggcgatgtcatatcgactcccgcttttttcagtatgtcaatcggatattccgagcttcccgcttttaagaattcggtatagcgctccaccgcaggctggccttcttttaagatctggctgctcagcgcttgggccgcactgtagcctgtcgcatattgatacacataataattgtaatagaagtgcggaattcttgaccattccagactgatttctttatcaatcaccatgttgtcaccgaaatactttttattcagatcataataaagttcgttcagcagttcaggcgttagcggctcgccttcctgtgctttcgtatgaatcagatgctcaaattcagcgaacatcgtctgtctgaacactgtgcctctgaatccttcaagcatgtggttgagcaggtacagacgctgtttttcatcctttaagctgttcagcatatattcaccgagcagcgcttcattggtcgttgaagcgacttcagcgacaaaaatgctgtagttaccgtacggatacggctgatattttctcgtatagtagctgtgcacggaatggccgaactcgtgaacgagcgtaaacagattattgacattgtcatgccagttcatcaagatgtacggattcgtgccgtatgtaccggacgaataagcaccgctgcgttttcctttattttcgtatatatcgacccagcggttttcaagtccttcttttaaaatagacgcgtattcctcgcccagcggagcaagtcctttgagcatataatctttcgcttcctcatatgtgaccttcattcccgaatcttttacgagcggtgtgtaaaggtcataaatatggacttcatcaaggccgagaacctttttccgcaggtcaatgtaacggtgtaataacggaagatgtttattgatcgttttaataaggttatcgtaaacttcttcagggatgctgttattggataaagccgcttcccgtgctgatttatactttttcacacgggcgtaaaaattatcttttttcacagtgccgctgagtgtagtcgccatcgtgtttttatactgtccgtatgttttatatacggcttcaaatgcgtttttgcggacttcacgattgctgctttccaggaaattaataaagttgccgtgtgtgatttgagtttccttgccgttttcatctttaatcgacggaaacgtaatatcggcgttatttaaaacactgaatgtattggaaggcgacgacagcgcttctgaggcttccgcaagcagggcctcttcttgttcgctcagcacgtgcggacgctgttttgtaatttcttcaattgcatgggagtaaagtttaagctcctctttttccagaataaactggtgcagcttgtcctcctgaatcgccagaatttccggttcaatgtaagcagtcgcgctggcagcctgggaatacaggcttgcggctttgtcgttcagcccttggtagaaagaatttcctgtatcctggtctgagcgcatatgcgcgtatgcataaagtttcccaaggcggttcgtcacttcatcctgtgccgtaagcgccgcgtataaattatcagccgaatgagcaagcgtgcctttaaaagaagataaattcgggattaattctttaactgcttgaaattctttattccaggcctcatcactaggaaaaatatcctctagtctccatgtatgctctgcctttacttcacttctgtcaggcaactgtgctgctttattttcctcagtcatggtgatccccctcgttttctttacttcaagccaattgaaaaaacgattgtttctccaaaaacttgtgttgtgattatcttccggcttttcactgccttttgtcaaatcatatgcggcatataagaccaagcataccaataatacagtgaaaaaacgaaaacaaacagcttgtacgcccctcacattcgccaccaccttgacgttagggtgaacgaaatgaagcattctcattccccaaaaaagagcagatcccgccggcgcagctcttctgccgtttgagggagcttccgttgagatgagggcatatatacttcattctcaatttcccttaaaaaatcctgcaagcataagaaatcagcatattgttttaccgccattccgataaggctatcttgtgaaccataccgcatccgaatctccttacgcctgattttttgccgcaaatcatgaaccatgcccgataatcggatcggtgcgccttttttagaaagttccgcaagccgtaagtataaatggccctgccacacaaaaacgggacttgcaaacacaaagcccgctgaaacaggaataaacacttcagaggggagaaatggaaatgcaacctgatgtctttcgtaaaaaagacgccggataagaccggcatcttcagataaaaaccgcccgcttttgtttcggaagccggctacggcacgtccccacgagggaagtctgacgctgtgccgcccttccggatgacaaatgtctttcaggtttgctttgtgaagagggattgtaattaagccggcataagaatagccggtgtaaaacggagtgatggaatgcagcctgtaaaaggagcgggcgtcggggcagtaaaacagtaaggaggaaaatgaatggacttcaaagaactgccagtgaaaagcagaaagccggaaaaattgcgcggccatccgttttaaccgttttgccccgatgatccagaccggccggtacccggcgtttttcaggcctgccgtccggctctttaaagagtccgccgaaaggttcgcacattgaaattcaaaagccagcctctcttctccgctttccgccgtcaagtcaggccgctgtccagcggaagtcagatacggttccaggctgacgctgcacccttgtgtctttagccagagaaaaagctgcctttttccttccagatggtattcgctttcaggttcggattcccctggacacagcctgctttttttatgagcgaagtgcggcagtttctcccgtcccagtttgatatcaagctcacttttgcaaacggggcagaaccagcgtttctttctcagctccgccgctttttcctttgaatagcttccggccagctgaatgagccgtccgtcggcagtcacagcactgaacatgttgcatcttctcctttcctgaatcttgttgtattcagcaggaagaagatataatcctgtttgcggatgagagccgttatacggttttcagccgttcatcctgtcattcagaacaaaaaaaaccgatttctgctgagagaaatcggtttgttatgatgcaaagtgtttttttattgtatataacgcatgatcagcgatcaccaatttgccgtattcttcaagacggtgaatgctgactgatgattcgtgcgcgtactccaacaggatgcttagctgattttcaacctcttcatcagtttgctcataaaaatctgcatataaataatatcggtcttcaaacgaatacagggtcgttttaattccgttaagattcaattttgatagcgagatgagatcctcaaaatcatcgaaccgcaaagtgaactgaagcttttgctccttatcttcccggctctcggcctgctcttctttctggaaatcatcaagtaaagcatcgagattttcatctgccggctcttgttttttatcttccgggatcggcagttcgagtttttgtccgtccttggaaagctgggcttttgttacgattatttccagtcctttgtccaatgcctgaacctgaatccaaagaggaccctcgacagcgaattcctcttcatcatgcacttcatccatgacttcccagaacagttcttcactgcgctcgcgattgtaccagatttcttctctgtcaaaaccgcgatcttcaatatcaccataagacatataaaattttacagtatgctcattaattctttctatttccattttgccaaccttcccttctttataagatgttgaagggacatctaagctcccgatgaatagtactttactacactttacccattccgtccacatcttaaccttatagaagacagcgcaaattctatatatttctattttatgataaaacagttataaaagaaataaaaaagcattttcacaccgaaaaacaggctttctcccggttcccatcataaatagcgcactgcttcatatattagctgtacaagcaatcgatctataagcgaggtgttaccatgccgcacgattacctgctgtcccttctgctcattatcggaattgaccttattctcggcggtgacaatgccgtcgtcatcgcgatggccagccggaatctggcccataaacaaagacagcaagcgatcatcttcggaacgtttatcgcagtcgtcttgagaatcgttctgacgagcgctgcggtctatttattgaatgttccttttttgcaatgcgcaggcggggtatttttattgtatctcggctatcagcttctgattgagaagaaagatgcgcagcatgtgaaaagcagttcttctctttggaaagccatccgcacaatcgttatggctgatatctttatgtcgcttgacaatgtcatcgcagtagccggcgcttctcacggtgagctgacacttgtagtgatcggtctcttcatctcggtgccgattatcatttggggcagcaagctcgttcatgccgccatggacaaaatgcctttattgatgtacgccggaagcggtcttctcgcatttaccggcggtgaaatgattgccggagacagcaagctgtcatttttcatggcagaacacggcattatacaaatgacgctgccgattttgaccgtcgtatttgttatcctcgccagtatgatttaccaacagactgaaaaataaaaaaagcccaaaccgcgatgggtttgggctttttccatgcttatcgtaagcttatatcagttggcaagacgctgtgcttctcttaattggaaagaacgcacttttcttggcaggaatcgtctgatttcatcttcgttatagccgacttgcagacgtttttcatcaatgataatcggacggcggagcagtcccggatgctcattgatcaaagtatataagtcttgaagcggcatagattcaacatttacgttcagtttctggaatactttagaacgggtagagataatttcatccgtaccgtcttcagtcatacgcagaatctgcttgatctcatcaattgataacggctcggagaaaatgtttctctctacaaacggaatctcgtgctcttcaagccaagctcttgcttttctgcatgacgtacagctaggtgatgtgtataatgtaaccattaatcttcactcctctaattagtaggatgaacatgttgtattctcaaattgaaataactttaaaaaaggaatctttataggtattatactataaaaaagtaagtgtgaacagtctcctgagaaaaaaatgtgtcaatccggcaaatttacggctggcggatgtttccccattctcaattagctcagctgatcgaaaatgttttttcgttttttctcatcaatgactttgagaacttcatccgttttttcgtatgattctccgtaccatttttcatctttataagtgtgaatgttttcatatgtctgtttcatcgcttcaaacatttcttcttctgattccgtcttaggtgaccagtacagaatctccattttgttcacttcattcgtagccaatgaccggcgccgatacccgattgactgcgcgtgcttgaaatgctctctttgataaaaacgcaagcgtttctgtgtatccgtgtcatcctcgtcaacaggctccacctcaagcagaatcggcttgtttttctttttcagcctgccgatcagcttacttccgaggccttgtcctctggatttctttgacacaaacaggtaatcaataaagatgaaagagtcaaattccgcatacatcagcacgtggtactgcccctcttctttatgataaacatcgctttgctcctttaacagagcttccatatgcgcttttgatttcatttcttcaatcggaaaatattcactcagcttttcgtaccagttcattcatttgctccttatgggttcgttgacttcacacttttagatataccccatttccgattgtttaaacaatcttacatctattaagacgtgtgatcctttaacatggtttcaatttttttaaaatggtgtgtaatcgacgtttttggtatagcggtttgccgcgtcccacaataaaaattcgtcaattccttcatcatgcagcgctttaacctggtcttccacctggcgttttccgtacttttgataatttccgctgccgagatatgatgccgtgaagtcctgaagccacggacgcgatacaggcgggtgtttcagcttagacagttttttatgttccaccttcgcgtattctttgacgactttgtaaggctcaagatccggtttatcaatgccgaaatagcttgtccaatggctcggataaatcatggatgaaatgacatcgacctgttctgaaattttgctgaaattctggccgatcccaggcgcttccggcagcgtggctgaatagccgaaaatatcaaccgacacatccgcgccgtacggcttgagttttttcttcgcataaccgacaaaatcggtgacggcgtgaacgcgtttttgcacattgctgtctgctgtttttccgtaatcgccgtgtccgtatgtcagttcgtcatcacgtttttcaaatccttcaggaaaacggacataatcaaactgaatttcttgaaaacccatctttacggcttgttttgcaatctttacattgtaatcccatacttctttcataaacggattgacgaacgattcgccgcggccgtttttccagacacttccgtttttttctttaaaggaccactccggctttttgttcgcgagttcgctgtctttaaatacgacaatacgcgcgatcggatagatctttttttcctccagctttttcatcatcttttttgggtctttgatgtacggcttggcgattttggcatactcagaatggccgtccggcttaaaggtgagatttccgttgtcatccttgacatcaatcaccattgtattgagctccgttttgtccacaaagtctgtcagctccccgaatttgcttcctcccgctgaatgccctgtgacgtaaatgccccgcaccttatcaggatgtgaaaaatgcagccctgacggataagcgaaccgtgcatttgatttcggcagttctttttcggccagcgctatttttacaagcggctgctcatctttcgcagcggcgtgggccggataagcacctgcactgataaacagtcccgcacaaatggcgcacaaaatggttttcatactgatctccccctttttttccattatagaaaaacgggagcaagcttaataaacttgaatgtgcgcaaaaaaatcctccaagactgagtcttggaggatgatacatttataggtaggttttaaattcatcttcagtgcacataacaaagtgtcccggtttcacttctctgaattccatcttttctccgtcttgcagctgatgaatggacggatcgtatttctttcgcgtgcgatttctttcatagtccggatcagggagcgggatagcggacagcaatgatttcgtgtatgggtgaagcgggttttcgtaaagctcatccgccggcgcaagctccaccaattttccgaaatacatgacgccgatgcggtcgctgatgtatttgaccattgataaatcatgggcgataaacaggtaagtgagccctttttctttctgcaattctttcattaaattgacgacttgcgcctgaatggagacatcaagcgccgaaatcggttcgtccgcgatgataaactccggatcaaccgccagcgctctggcgattccgatacgctggcgctgtccgcccgaaaattcatgcgggtagcggttggcgtgctctttatttaaaccgaccgtttccagcagttcgtgaacccgctgcatccgctcttttttcgtttttgccaggcggtgaatatctattccctcggcaataatgtcggcgactgtcattctcggatttaaagatgcgtacggatcctggaaaatcatctgcattttccggttaaactccagcagtttcttgcgggattttttcccgtgcacattttccccattaaagagaacttccccgccggttgcctcatacagccggataatactgcggcccgtcgttgatttaccgcatcccgattctccgacaaggccgagcgtttcgcctttataaatatcaaatgacaaatcatctacggcttttaccgttcctttttgcgtgaaaaaatgctgttttaagtgtttgatttcgagaagcttctcagtcatttttttcaccttccttcattaaaacaggatgctgatacgtattcggaagctgacggagtttagccttcaccgcttcaggcggctcgaccttaggcgcatcaggatgcagaagccacgatttcacaaaatgcgtatcagacactttatacatcggcggttcctgttcaaagtcaattttcatcgcatatgagctgcggagcgcaaatgcatcccctttcggagggttcgtcagatcaggcggcgtgcccgggatagccgtcagtttttcctgatcggtgctgtccaggctaggcattgaggcaagcagcccccacgtatacggatggcgcggatcataaaagatttcatccaccgtgcccgattcgacgacctgacccgcgtacatgacagcgacccggtcggcgacattggcgacaacgccgagatcatgcgtgataaaaatgatagacgtatcaattttcttttgcagatctttcatcagctcaaggatttgtgcctgaatcgtcacatcaagcgctgttgtcggttcatcggcaattaacagtttcggatttgccgcaagcgccatcgcgatgacgacacgctgtctcatcccgcctgaaaattcatgggggaattggccgatccgtttttcgggcatcggaatcccgacgagatcaagcagctctatggcgcgctttttcgcggcttcacttgagattttttcatgtttgaaaagcacttccgtaatttgtttgccgactctcatcgtcgggttcagagaggtcatcggatcttggaaaatcattccgatgtcctttcctctgatggcctgcatttctttttcagacatcggcacgatatcgcgtccgtcaaaaagaatctgtcctcttttaaagtagcccggcggcatcgggatcagcttcataatcgcttgggaggtcacactttttccggaacctgactcccccacgatcgcaagcgtctctcctttattcaaatggaaattcacgccgcggattgcctgtacctctccgccgtatgttttaaatgaaatggctaagtcttttacttctagcaaacgtgtcactcatatcactccttatttgcgtaacttaggatccagcgcgtctcttaacccgtcgccgacaacgttaaagccgaacatcgccaggcagataaagccggcagggaagaacagacgccaagggtaataggttaatgcaggcaatccgtctgaggccatcgttccccagctcgcaagcggcgcaggtacgccgaggcccaaataacttaaaaacgcttctgtaaaaatcgccgtcggaaccgtcagtgtcattgttacgaggatagagcccatcgcgttcggaacgatatgcttaaacaaaagccggccggttttggcgccgagtgtctgtgaagcaagcacatactcctgattctttaattgcagcacctgtccgcggacgatcctcgccatattgatccagcccgtgattgtcatggcgacgataatggtcagcaatcctttcggcaggacaaccatcagcaaaataaccattaataatgaaggaacagcccacagaatgtcggcgatgcgcatcatcacttcatctgtgcgtccgccgcggaatccggaaatgctgccccagattacgccgattaataaatcaagcacggcagctgcgacaccgataaagatagaaatccgcgcgcccacccatgtccggacgaatatatcccttccaaggtcatccgtgccgaaccaatgatctttcgagggcgctttatccgcatttaatagattggtagtggcataatcataccttgaaaagacaggcgcaaaaatcgccatcagaataataagaacgatcagaacgaacccgaccatcgcaagcttattgctgcggaagcggagcatggcgtctttccagagggaaaggctttttttatttattttttcggcatcgccggcattagctgaagctggttcaaacatatttttaggaatgttctgcatggtctaggctcctttctttgctttggaaagcttgattctcggatcgattaatccgtacagcacgtctacaattaatacgcataaaagcaggagcacgctgaagaacacggtaactcccataatgaccgtataatcacggtttgtaatgctgtttacaaaatgcgcgcctaaaccgggaattccgaaaatggattcaatgatgaaacttcccgttaaaatggatgccgccatcggccccatatatgtcacgaccggcaaaagcgcgtttcgcagcgcatggcgcacggtgactgacggacgggaaagtcctttagcttttgcagtccgtatgtaatcgctgtttaacacttcaatcatgcttgaacgggagagtctggcaatgaacgccatcggcatggaagcgagcgcaatagagggcagaaaggtgtatgcccaggattcccaccctgcgaccgggaacagttctaatttaattgagaaaatatattgcaaaatcgtcgccaatataaagctcggaactgagatcccaaagatcgttaaaatcgcaatggtataatcctgccatttattatggtacagggcggcaagcaccccgaaaagcacaccgaacgctaaagcgaggagaatagcttctgcaccgagagtgaatgaaacggggaagcctgaattgattaaatcattaacactttggcctttatatttaaaagaaggtccgaagtcccacatcgccacagattttaagtagctggcatattgaacgaaaagaggcttgtccaggccatagtgttcgtttaagtttgcctcaatttcaggcggcagctttctttcgccggaaaatggtccgcccggcgctgcctgcattaggaagaatgtggcggtcacaatcacaaacaatgtgatgatcatgtaaatgaatcgtttaccgatatatttcagcaaggtgaacacctccatgttttttacaattttatacttaatcagtaagaaaggtatatggggacatcctccccatataccttgggtcttttgttttcagaaccgtcttttattcaaaagaagcatttctgaagtaaacttcgcctgttcctgtcaagatcacatttttgaggtttttatcctgcacccaaggatccgtatagaaataaactggcgcgaccggcattgcgtcaataaagatcttttctgcttttttcagctcttcgatacgtttatccggatccgtttcaagctgagattggttcagcagctttttaaactcaggatcttcccatccggtatcattgtttccgccttctttatcacggaacaattctaggaagttgatcggatcgttgaaatcgccgagccagcccatacgcccgatttggtagttctggctgtgcagcttgtcgatgtaaacattccattcggagttatcaagctcaactttgacgcccaagttctttttccacatttcctgtacggcctgcgcaattttcgcatgcgcgtcatccgtattgtaggacagtttgatcgccggaaggtcagaggcattcttgacgcctaattccttcagtcctttatttaagaattctttagctgatttgacgtcattgtctttgaaataaccttttgtgttatccttgaatcccttcattgacggcggcaccgcagccatggccgggatctgttcgccctgcgttacatttttcacgatggacgagcggtcgatcgcataagcaagggctttacggatgttgacattgttcagcggtttcgcttctgtgttgaatttgtaccaatacacgcctgcgatcggttcaacgtgaagagatccgtcttttttcaatgtcggcagagattcagtcggaagctggccgagcggcattcctgcccagtcaagctcaccggcctggaattttttcagttcggtgttgttattgttaatcatcaccatgttgattttcttcaatttcacagcgtctttatcccaatattgatcgttcttttcgagcgtgatggaaccgctgtgtttccaggccgtcattttgaacgggccgtttgacacataattttcgcccgcgtttgtgttccagtttttatgtttttccgcgattttcttgttgatcggcatatacgtatagaatgaagttaattgcgtgaaataaggtgtcgggttattcagttcaacctttaatgttttgtcatttacggcttttacgcctacatcatcaatcttgccttttcctgtattggcagcttcagcgcctttgatgtagtagagctgataagcgtattgtgattcgttgttcgggtcaagcgcccatttccacgcatattcaaaatcctgcgccgtcacagggtcgccgttagaccatttcgcaccgtcacgaatcgtaaatgtataggtctttccgtctttgcttgtttcaattttagatgccattccttcttcaggctcacctttggagtttacgcgtgtcaatccttcaaaagtctggcggattacgcctcctgaaacggaatcattcgctaaaccaggatgcagtgagaacggctcggttttaatattgatattaagtgaagtctgtccttttgtgtcttttttaccgccgcctgatccgccgctgaatccgccgcacgcacttaatacaagcgagaagataagcatcaaacctataatagaccaacgctttttcatgcactaaccccctaatcaaatttttcagcctttactactaaatactcagaaatatcagacaaaataacttaatatttttctaaactttaattgtgttccgtcttttctgattattttatgtaaagaagctgtaacaatagagtgaacaagttcattataatgaaatgaataatttattgcaatactattttctcaatttaaaatatttaaatttggtcagtttttctgtcaaaaaggtgatacacttctatagtttaaagcatgacctaactaaatttttttattgcaatttccagttcatattgctttttacatataatattcgttatacgaaatgttgatatacgttatcatttaagcattttcagttctttttgaggatttccagcccttaagcaaactggaaataagcttgtattcctctgatgacatttggctataattgatttataatagatcaatcaaatacatttgttgtgattgcgatgatgaagagtagtacacattttcatccgtttgaagagagtctgcggtgctgggagcaggtaacgggcgatgtggaatggacttctgagcagctgaccgaacgttagtaggcccagccggagcagcctccgttaccaacgtctcgagcgattccattgtaatggaataatcagggtggcaccacggttcattcgtcccttttttctacgggaagaatgggctttttttattatgttttaagaaatgaggtaagaaatatgaagaaaacgattttttcaggcattcagccgagcggttccgttaccctcggcaactacatcggcgcaatgaaacaatttgtcgatttgcagcatgactacaacggctacttctgtattgtcgatcagcatgcgattacggtaccgcaggatcggcttgagctgcggaagaacatccgcaatctcgcggctctttacctggccgtcggacttgatcccgagaaagcgaccctctttatccagtcggaggttcccgctcatgcccaggcggggtggatgctccaatgcgtcgcatatatcggcgagcttgagcggatgacgcaatttaaagataagtcaaagggcaaagaagccgtcgtgtcaggactgttaacctatccgccgctgatggccggcgatattttactgtacggaacggatcttgttccggtcggagaagatcaaaaacagcatcttgaactgacccgcaacctggcggaacgcttcaataaaaaatacaatgacatcttcacgattcctgaggtgaaaattcctgaatcaggcgcgcgcatcatgtcactggctgatccgctcaaaaaaatgagcaaatcagatccgaaccaaaaggcatacatcacgctgcttgatgagccgaagcagctcgaaaagaaaatcaagagcgccgtgactgattctgaaggcattgtaaagtatgataaagaaaacaaaccgggcgtttctaatcttttgacgatctattctattttaggaaacacatcaattgaagaattagaagctaaatatgaaggcaaagggtacggtgaattcaaaagcgatttagccgaagtcgttatcggcgcattgacaccgatccaagagcgctaccgtgaattaattgagagcgacgagcttgaccgcattctcgacgaaggggcggcgcgcgcaaacaaaacggccggcaaaatggtgaagaaaatggaaaacgccatgggtctcggacggaaaagaagataaagaaaagaggcgggagaatccccgcctcttttttagttcacttttgattcctgctccatttcccaaagcttttcgaaaaacggctgccctttaatcaaattttcacagaacgcaagatgtttatctgaccagccttcaattgtttcattgtaaagcatgtcccagatctcttcaaagctcatccgtttgatctgctcatacatatgcggattccattccgtgtaccaatacacaatttccgcacggtttttcagccctttcagctggtcgagcgccataaacatcagctgcttgatctgccgctcttttctcgtcagccctctgacgtgctccggcgccaatgacaaaatgtgatattcctttgaagactccaattgcgccggctcaaattgaaacgattccggttctacatcctttaccatttcataaacaagctgctcctgtctcggaatcaggcggctctttctgaccggaatggtatacccgatcgtatccacggcaatgatgccgatcccgtctgtcacgacaaaacaatactccagctttgtccgctcatgattttttcgcacgtatgacttttggtggacttggtcaagcagttctttcggaagctctgataagtcgttttctatgtaatgaaataataccgacggcactctgagcagcggcgtctgatccaaaagctcaaccgtgtcttccttccgccattcatgaaaatggcatacattgtagccgttttcttccccttcaaaccaattgacccatacatcatgaagaaataacatattcgacccctcactttataaaaactgttgtccacagtataggcaagggatagataaattattccatttcaatatgagatttccgcaatacggaactggatttccgactgcatcgcaacaaaaaaatctcccgttccgtccgggagatcatttcacatttttcggatcaagcgcatcacgcagcccgtctccgacaaagttaaagcacaatacggtaagaaggatcaacaaacctgggaataacgggtaccaccaagcctgaatcataagcgtaaagttctgtgcatcctgaagcatattgccccagcttgcgatcggcggctggatcccgaaaccgagataacttaatgtagattccgccaaaataaccgttcccacctttaatgtggctgagacaataatcggtccgagcgcattcggcaatatatgagaaaagatgatgtgatgattttttgtaccgatcgtctttgcagctaatacaaactctctggaacgaagcgataaaaactcccctcggacaaggcgtgccgttgttgtccagcctgtaagggagaaaattaaaattaatttatccattccgggctggaaaatcgtaacaagtgtaataagcaaaaatatatcaggtatggataatacgatatcaacggttctcatgagaacggcatcgacaatccctttaaaatatccggcaacggctccgacaactgtcccgattgtaatcgcgccgatcacagaagcgaatccgacaagcaaggagacgcgcgccccgtacagaaccctcgtaaagatgtctcttccgaatttatcagttcccattagatgttttaagctcggcggcttcaaacgattgataagagattgactctccggagagtaaggagcgattaccgaagcgaataaggctgacaagatgatgatggttaatataacggctccgattacagctagtttattttgaaagaacttttcgaaaaaaatcttcgtcattgtttccggtttggattgaatattttcctttaattttacttcgctggggggtgtgccggtatttggctgtaacatttgacctctcacctctctttgttaatattcaatgcggggatcaaccagcgcatataagatgtccgcaattaaattccccaccacaaccaaaacagctgaaatgaccgtcatggccatgataaccggataatcccgcgaaaaggctgaatcaataaacaatttgccgagacccggccaagtaaaaatctgttctaccactaccgctcccccgataaatgacggtatcatcagaccaaaaatagtgatgacaggaagaagtccgtttctcaaaccgtgtttaaaaatcactttattatctcggaatcctttcgcacgcgccgttcgtatataatcctgttttaacacatcaagcatactggatcttgtgtatctcgttatccctgccatgtctgccgtggcgagcacaaaagcaggcagaatcaagtgatgcaatcggtcaaatatgttaaagtcagcattcaaagtgcttactccgccagtgggaaaccaccccagatttacagataaaaccatgattaaaatcaaaccgaaccaaaaattcggaatggcaagccctaaaaatgaagtaacagttatcccgtaatccaattttgaataaggacgcttcgctgacagaacaccaaatggaatagaaataagaagagcgacaagggttgagaaaagcataagcacaatcgtattcggtaagcgggataagataagttcagaaaccggagtgcctttcttgacgatagaagtcccgaaatccccttgcagcatattccccagccatttcacatattgaacaggttccggatcattcagcccgtatttttcaatgaatttcgccctgtccgcttgactgattgtagggtccatcataagtgacatcgggtctcccggcgctgctttcatgatggcaaacgacaaaattgtaatgcctaagagaatcggcaaggacattaatgttcgccgtaaaatatatgtaaccatgttcttgtcccctttttaaataggataagagaggaaaggaacctccttccctctccagggcttttgctatttttgatccagccaccatttttcaatattgtacaagtcatttttagggtggaatacatagccttgtaaattattcggcatcgctctgtggtaattgtaatagaataagaagctgtacggctgatcttcagcaatcaatttgtatatctcttcatacttcttttggtattcttttctgtctgtaattgtcttcgcttcttcaagcagcttgtcgactttcgggtttttataccagatattattcagcccgtttttcgattggcttgaatggaagatagagaactgatccgggaacgttgcaagactccatccgagaagaagagcgtcataatcccatttaggggcacttgtctgttcgattaacgcactgaattcaacaattcgcggtttagcctcgattcccacttcttttaattgctgctgaacgacaacagctaaatcttcacgaattttattgccttgattcgttttaatttcaaatgagaatttttttccgtctttatcaaggtagccgtcaccgtcatggtcttcccatccggcttcttttagcagctgctttgcttttttcggattataatcaaatgtcggcactttagacttcggataattccatgacagcggactctcaggaacatccgctaccttaccgtctccgttcagcacttgatccaccattgcctgcctgtcaagagcgtaagtcaatgcctgacgcacttttttgtccttaaagatctcttttttctcattccagccgatatagctgtagtttaagccaaggtcagatttgaccttcacatttccaaacgttttaactgtatcaaaatctgtgcccggcacaacgaagaaatcaatatcccccgcttttaactgagccacggcagcgttagaatcaggaatcgttttgactgtcactgtatcaaggtaaggtctgccgccaaagtaatcatcatttgcttccagtttgacatactcgccctttttccactcaacaaacttaaacggaccggagccgattggatttttacggttaaattcattctctcccagatcagcaaccgggaccttacccaatatatgtttaggcaaaatgccgtaactgtcgagaacgacattatagaaataggcatcttttttcttcattttaaactgaatttcatattttccttttttcgttacggatttaagggactcaaaacccgagccacgctcaccgttgtaatccttgttaagagggatgctgtaggtgaaaacaacatcatcggccgtcagctcttttccatcatggaatttaacgccttttttcagttttacatcatacgttaatcccccgtcagcttctgttactttttcagccagcgacggcttgacgtttaatttctcatcagtttccagtaatgtgctgtaaagcattccttcaatatcagaacttgcaacatcggtagaataaagtggattaaaaagtgtgggttccccggttgacccgacaaccaaatctccgcctttttgcggttttcctgccggtttggattcggtgcttgtggattttgagccggagcaggctgacaggaagatggcgagcgccataaaaacacttagcatcatcagtgcgcttttacgtaatttcatatcaattccccctttgtgatatatatgcagcaaactggttatgtaatccggcataccccctctcgatgcttgtcatttcaggcatataaatggcaggcgacgtaatggccgggagcggcttcttcaaatgccgggatttgttccttgcagatcggtttggccatcgggcaccgcgtgtggaacacgcagcctttcggcgggtttgccgggcttggcagttctcctttcaggatgattcgttcccgcttgacggcgtctttttttctcgtgacgggcactgaagacaaaagcgcttgcgtataagggtgaagcggattgccgtacagctcgtgtttatcggtcagctccatcatttttcccagatacatgacgccaactctgtcgctgatatggcggacaacactcaaatcatgagaaataaacaaataggtcaggttgaattcttcctgcagttcttccatcagattgatgacctgggcctgaatggagacatcgagtgcggaaacgggttcatccgcaataatcagctcgggattcaacgtcagagcccgcgcaatcccgatccgctggcgctgtcctccggaaaattcgtgcggatagcggtttgcaaagctcggatgaaggccgactttcgccagcagctcctccactcgctcgttccgctcgctcatgctgtacatatggtgagtctggaacggttctttaataatggaacgcagcgttttcctcgggttaagggatgcgaagggatcttggaagaccatctggatgtttttgcggacgctttttctcagcttttcttcagataatccggagatatcctgacccttaaaaagaatacggccgtctgtcggcttgtataaacggatcatcgtccttcccgccgttgatttgccgcatcctgattcaccgacgatgccgagcgtctccccgcgcttcagtgaaaaagaaacgccgtcaacagcctttatatcaccgactttcctttgaaaaaaaccggagcggatcgggaaatatttttttacgtctttcagctctaaaatcgtttcttggcctgcagctgtcattttgattgggcaccctcttcctcatataaaaaacatcttacagaacggccgctttcatgcgttatcagctccggctgccctgttttgcatttgtccatcgcttttgaacacctcggggcgaatcggcagccttccggaagattatccggtgtcggaacactgcctttgatcgcttttaatgtatcaatctctccatctatcaccggtatggagtttaacagcccttcggtatacggatgaagagggtttaaaaataagtcctccacactcgcgctctctacgacttgtccgcagtacatcacgatcaccctgtcggcggcttcggaaaccacacctaaatcgtgagtgatcagcagaatggaagtatcgaattttttgcagaggtctttcatcagctccaatacttgggcttgtatcgtcacatcaagcgccgtcgtcggctcatcagcgatcagaagcttcggattgcagctgagcgcgatggcgatcatcaccctctgtctcatccctccggaaagacggtgcggatattctttcatcacttgttccgctctggagaatccgacgagttccagaagctcaacggcttttttagccgcttctcttctattcatttttttatggtattcaagcacttcggtaatttgttcgccgatggtcagcaccggattcagggaagtcatgggctcctgaaagatcatagagacgtcatttccgcggattttgcaatattcgttttcggtgaaggaggccaggtccctgccttcaagcttaatcgagccgtccataatttttccgcccgagctttggacaagtcccataatagaaagcgaggtgatgcttttgcccgagccggattctcctacaagagcgacggtttcgcctttgttaatgtgaaaatcaaccccgtcgactgcggggatcggctgtttctttctgaaaaaataggtctttaaattattcacttctaatagtgtgctcatgatacgcccctttctcattccgctgaagcagagggaaacatacgtttcgctatcacaaaatatagaatagtcgaaaaattttatagttgtatattattacatcattattacaaaagcaagaattttttaggataaatgtaatatccttaaataatttccattcttttaatctattaaagcgttgcctccagaaaggtttttgaagggatggccaatgcttcttttactgttttttgatggtcggttaaatatttttttactatattgaatccgacggcatagccgagcattgaggggaagtatccttttccgtataacagctgggaaaacattctgctgtctctcgttaagcggaggttcggcttgactcttttttcaaacagaaaatcaagctgctcaggcgtatagtaggacgtccattcagccgtaagacttgagccgaaccgctcatatacagcatattctgccagcccctccatcatgattgtatcaagaaatgtctcgtctttttcgtcctttgtcacatgttctaaccggcagacgtgattatattcatgtgtcataagggcggatacagctgaattggaactatccgacgatagaaagaggaacattttgtcccgaaaggccagaccggattttgatccgaattcctgacggattttccggtttcgttcgtcgacgggcaaaacgacgatcggcacgtccggcccgttccacttctcctttaaataagcttcctccttttgaatatggctgtagcatcctttttctttcagccgtttactggtcctaacgccgtccttcaaatggcggaacatgccgtggttttgcagcatcccgagtatcggcttccactctttcttatcggcccctgaaaaaagcggcaaaagatgcggagccagatcatttacggatgccgccttttccatccattgatatgtctgcttgacgctcatacggttcgcctcctcttgttgttatcatatgcacacaaaaaaaaccggccacctttttcaggcagccggtcaaaaactgtattattgatattttttaaagatcaaagtggcattatgtccgccgaagccgagcgagttgctgagaacgatgttgacatcctgctcgcgcgctttgtccggtacataatctaaatcacactcttcatcaggtgtttcgatgttaatcgtcggcgggataatgccgtctttaatggccatgacggagaagattgcttcaattcctccggcagcgcctaacaaatgacccgtcattgattttgtcgaactgacggcaagcttgtacgcatgatcaccgaaaacggtcttaatggcttttgtctcgtatttatcattgtagtacgtgcttgtgccgtgagcgttgatgtaatcaatttcttcaggcttgatgcccgcatctttgattgcttcctgcatcgctcttgcaccgccttccccgtcttgggcaggcgcggtaatgtggtaggcgtcacccgttgagccgtagccgacaatttccccgtagattttcgcaccgcgggcaagggcatgctcaagctcttcaagcacgatgatccccgcgccttctcccatgacaaagccgtcacggtttttatcaaacgggcggcttgccgttttcggatcaggatttgtagaaagggctttgtttgcgctgaagcccgcaaatgacattcttgtcagcggcgcttccgttccgcccgtaatcatcgcatcggcatcgccgcgctgaatgactttaaacgcgtcaccgatagagttcgttcccgtcgcacatgccgtcaccgtacaggagttgactccttttgctccgagagcgattgagatttggcctgtcgccatatccggaatcatcatcggaacaaagaacgggctgacccttctcggccctttagtcaggaagatttcgaattgggattcaagcgtttcaagaccgccgattccggacccgacccaaacgccgactctcggcgcgatctcgtctgtgatattcagaccggcatcttgaacggccattttcgcggctacgacagcatattgcgtgaagcggtccatttttcgcgcttcttttttatccatgtgattttcaatattgaaatctttcagttcagcagctactttcgccggatactcgtccgattccacacgtgtgatcggtccgattccggatacgccgccgattgcatttttccagcttgtttcggcgtcgtttccaagcggagacagggctccaagccctgtaacgactactctttttttactcatcttgtgtacacctcacctttttttatcgtccccagcgtattgctatggcgccccatgtcaatcctccgccgaaaccgaccatgacgatgacgtcgccgtctttaattttgcctgcttccagttcctctactaatgaaatcggaatggatgctgcggatgtgtttccatatttatggactgttttagacatcttttcaaccggaagctccaaacgttcccgtgccgcttccatgatgcggatgtttgcctgatgcggaatcaaaaagtctacgtcctctttggagaggccggctttttcaatgacatttacactcgattcacccatttgccggacggcgaatttgaatacttctcttccatgcatgattgtatgccctttttcatctaagtacaagtgctgaccgcctgtaccgtctgctccgagctcaaatgacagtatgcctctgtcgtcgctgaccggtccgatgaccgccgctccggctccgtctccgaacagcacagccgtattgcggtcgtcccagtcggtaatgcttgagagcttttccacgccgaccacgaggacatgtttgtatgtttgcgattcaatgaattgtttggcggttacgataccgtacataaaacccgcacatgcggcgctgatatccatcgcgcacgcttttttggccccgagcttctcttgtatcatacaggaaacggtagggaaggactggtcaggagtaaccgtcgccacgaggatcatatcaagctcctcagcggaaatgccggcctgatcaagcgctttttgcgcagcctcagcggccatgccggatgaatacatatcttccgcggcgattcttctttcttctatacctgttctcgtacgaatccactcgtccgatgtatctaccatttgttcaagatcatgatttgtcagcactttttccgggatgtaacggccgacgccaagaattccagctttcattggaaaagactccttttttataatgaatttaaaactaattagttatgatcaattattagtatcaggtactaattctaccctattttttttctgttggcaatatattcgtctaaactatcggacgctgctcctcatagaataaaaggaagacgaaaggaggcttcactatggatattttctccaaaatgatgttcggcgattccagagaccgggataaagaaccggaagaaaacccggagcagcctcaggctgaaaacgaagaagagatcgattacaaccacgtgatgaatcagctggggtccatcatgaactctctggatcaattaaagcccgtatttaaagacttcgcgccgatggtgtccgctataaagaaaaaaatcatgtgaaaagccacttcatgaaaagtggctctctttatttattcagctccccggcatcagatctgccaagctcatacgcttccgccatgaccgatgtaaacaggtccataaacggctgaatcatttccatagacagatctatgccggatttctcaagctccgcctttgcttccggcaggtatttcatcgcgatctgcataaattcaagagacttttcatgctgcatgtgtatccacctctattcatttgacggcagttcatttgttcggttatacgttttgacaaggtctgagattttgtcttgaaatgctttgtccaccagagggctgaacgtccccatttcaacgactccttccctgaaatcaaagttgtgatctccgctcttgagcgaacctttattatattgctcggcaattaatgtataggctttatctacgttttgcaccgtgcttgtcagcaccgtgtttttgccgagattcgattgttcggcgacatagccgatggcgtaaagcccgtcttttttgatttgctgaatgacaggaacattatacccgtctccggccggatatacaacatccgtgccttccgcttttaacttctcgtaaagatgcagcgcttcattgccgttatcccagtggtccgtaaattcagtattgacggtgatatcaggcttttcatatttcgcccctttgataaagccgtctacttcaggctgccacaaaaaggaggcgatgacgccgacctcattggtttttgacatatgggcggctgtcattcccccgaaaaaacccattgcttctcccataagatgaacgcttgtgacattatcgcttttcgccgttccgtttgcgacgacgaattccatgtcgggataatccttgctgatcatattgaagatttcctcgtattcatttccgtgcccgtataaaagattgactccttttttatgaaaatcatctatcgcttttaaaatatcttcatcggatctgatattttctttataataaacgtcaacgttaaattcagattgtatcgctaataaacctttgtaaccttttgtgccccataccaagtcactgatggtatcgggaaaaagcattccgaccttctcaatttttcctttaaacggagtttgtgcgcatccgctcaataaaaggaggacagaaaagatcatgacaagcctggtgatcaagccatgttcaaccccttttcaaactcataacatatataattgatatacgtttattgtagcggtaatgcacataacatggaaggtatttcttaaaaaatgtcgaatattgatgaaaattgtcttttccattctttaattttttcttccgcttccgttttttgcgttttttcttttatttccagggtaataatctgattttcgtcttctgtgccgtcagcctcaagctgattcatcagcccgcagaccgcgtcttctaaaaagatcctgctttcgccatcttctttttcttccgtccacggaccgtaaaggggaggaaggataatcgctttggctgtatcccgctgagcgtttttctcccagtctccgtgatcctcactgtaaacaatccaatataagggctcagccctttcttcaggcagacacccgctcccgtattgaacgcagatacgatcgtattccttttcaccgatttcatctattatttgaaaaagcccgtttctcgcgagccacattaatcgttcttctaaatacagctgcctcgttttgtcctccggttctgccaaaatgacatcaacgtgcacaccctcatccatcaaccgttcgcacaatgaaaggccgagaaattcatctgctccaatgatcagcgctgttttcatcacatctgccgcctttccggtttttcattcacacacaagccaaacagccctctgaaaagagatggctgttgtattctattcattacaggtctttttcatgactgcggaaaaaccggcagatggctctgtaaatacgcgcagggttctcaagcaggtgatacgtgatatcagtcttgcttccggtcttttcccgggcttctttatacgcgttcgcatgcagggtgtacgggtacggcgctccggtcgttctttgccatatatgtaccggcgcccgggtgcggcagccggtaatggtctgatagctcagtgagcttgcctctttttcagaaacaccgaagctctgtgccgtttccctcagaaactgcttataaaagaacttattttctttctctgattcaaaatgggcttgaaggtcaagacaaggatctaacattgcggctgaacggatatgctccgctgaagactgcagcaattgatcggcgataagggcgcccatgccttctgcgagcaagtgtattttcggattgagggtttcttgtttcagcacataatgcatcagctgtctggcgtaaaggacggctttttccgaaccccaatgccgcccgtataaattgctgttaataatggtgtaccctctgtcaagcagcacatgtaacagctggtttctcccttcatgttcgagccaaaagcttgagtcccggctgacaaagtgggttctgtcccccagaataaagatacagaagccattcggccgatacggcagatggatgacgttcagctcagatccgaattggaaaaatctttccgtaatccccatgcctgcccgcctccttttactcctaatctctctattggctatcatatgtaagaagaatgaaaacggatcggataaactcctatttgctgctatgttttggctattatcccaagcacaggaaccgaattttccatcagacggccggacaggcgggcacatgtcagtttcaggcgcgctttttgatgagaaaatgaccttccgcccgcgctttatgtatggtatgatacaacgtagaataaaatgaaggacgaggtggaaacgtgcggtttattatcggttttatttggacgttccttttaacacatatggcctgttatctggtcgcctccatgaacagcgcggcgtacaatttcaagcaatcatccgttattgccgtggttattgcggtgctagtctttgttcttgcggagatcatgcctgtcaaacaggatgcaaaccagcattaaataaaaaaacctgctattcagcaggtttttttgtgttcacggttttcgttgatacgtccacaatctgttgtggtttgaagtttcagggaacatttctccaaccgtaagcttgattttttgcggatttttgaccatgcttcccgtttcgccgatttcaacgtacacaccgttattcggcgctttttgtcccgggcggaattgatgctgctgtcccacgtcatttcctcctttttcttttttatgtagtatgcgcttgtatgcggagaaatattaaaaaccgctgaatgagattcagcggtttttttgttcatcctgtttgtaaagaagagctttcaggagcgctttttgcgcgtgaagccggttttccgcctgctgaaataccgcagagttcggaccgtcgataatctcggacgtgacctcttcttcccgatgcgcgggcaggcaatgcaaaaatgtatagtcgggtttggcgagactgacgagtgaggcgttgacttgatacggggcaaacacatgcagccgctgctgcgtctcttcctcctgccccatgctcgtgaagacgtcggagtaaatcacgtctgcatcccgcaccgcttcctgcggattttcggtaagggtgattttcgctccggaaacagccgccgcttcttttgcggcatttaccgcctcttcctctacttcatagcctttcggcgaagcaatcgcaatgtcacagcccatttttgcgcagccgatcattagtgaatgcgccacattatttccgtcaccgatataggcggcttttactccttttaattttccttttatttcttgtatcgttaacagatccgcgagtgcctgacacgggtgataccggtcggtcagcccgtttatgacgggaatatcagcatgctcggcaagctcttcgactttttcatgctcaaaggtgcggatcataatggcatcaacgaagccggacagcaccttcgccgtatccgcgactgtctccccccgcccaagctgcaggtcgctgcttgaaagaaatagtcccgttcccccgagctgggccattcccgcttcaaaagacacacgtgtgcgggttgaagatttttcaaaaatcatcgccaatgttttcccttggaaaatcggctgtatcggatgttgttttaataatgaagcttctgtcagaagcgcattgatgtctgacgggctgacatcttttaaggaaagaaaatctttgccgtacaaatgggttaatgtgtgttccgcttttattgtgtgcatgatgccacttccttttgataaagatctttgagcgatacaggctgaggttcgccggagccgcttgctaaaaatgcctttacggtttccggttcagtaaagaccgtcacaccgtgcgtcatggcttcaatccgttgtttacgcgcttcttcagagtgattgaaattgatgtggaccgctttatcctttcgctctgcccatgccgggaacgcatctttgcataccgtaaatcccgcctcttgagcctgacgttccaattccgcatcacagccttccagatagatgctgccttttttctcccagacgtgcgcgtagatttttttcagggcgctttctgcgtcaaacgcgacacacatgccttctccggtcgacttcatttccggcccgggctttacatccacatcctgaatggcgtgcgaagaaaaaaccgggaatttcactgccgttccgtgctgattttgaacctcgggcttgatgtctttaagggaagcgccggccagcaatctggcggcaagcgggatcatcggcacccccatcaccttagacacgacaggaaccgtgcggcttgcccgcggattcacttcaagaacgagaatatcccctttgtcatcaatgacaaactgaatgttcatgatgcctttaaaagccagttttaccgcgattttttcggcggcctcttttatattccgctgcatatcaggtgtgacagacggacccggaagaatcgcaaaactgtcgcccgaatggacgccggcgcgttcaatgtgctctgtgtaagtcggcacgaatacttcatgtccgtcggaaatcagatcgatctccaattcttttcctgtaatgtactgatcgatcaaaatcggatacggcatgcccgcctcatttgccagcagctctgacatttgcgcttctgaatcaacgatgatcatgcccatcccaccgatgacataagacggacggatcagcacagggtagccgattcggcttgctttttccgttgcttcttcttttgaataagcggtttcgcctttggcatgtttcaggtcaaggtcatcaagcagctgataaaacagatcccgatcctccagcgcatcaagggtttcaaaggatgttccgagcagcggaatgcccgctttttccagcggttcagcggcattgatcgcggtctgccctccaaactggacgatggcaaaatcaatgttttcatgttccgccacgttcaaaatatgttctgtcgtcagcggttcaaaataaagccggtcagcgatttcataatccgtgcttactgtttccggattgttattgatcataatcgtttcataccccagcttttgcagggtcagaacgccgtggacggcactgtaatcaaattccactccctgaccgatgcggatcgggcctgagccgatgatgagggcgcgttttttctctttccggctgatatctccgtcgctttccccgaggtaggtggagtagaaataattcgtcttggcatcaaattcagcggcgcatgtatctacgattttaaacgacgggacgatgcctgatttctttctgagagcacggatgtcttcttccgtttttcccgtgagagatgcgatcatgacatccgtgaagccttttaccttcgcctgctttaaaagcagcattgacagatgatccccttcttccatcagcttgttttccaatgtgatgatatttcggaatacatggagaaaaaacgggtcaattttcgttttggcatggatgtcttctatcgtttcaccgcggcttaacagctccatgacgacgaaaaatctccggtcatccggcgttaccgctaattcccacagctgattgatcgtacagccgccgagttcaggcaggcgggtgccgatcgttttcagctcaagggaggccgccgctttttgaatggccgcttccatatttctttcaatcgccatgacctctcccgtcgctttcatcttcgttccgagcgtgcggtcggcatgtttaaatttatcaaacggccagcgcgggaatttgacgatgacataatcaagcgccggttcaaagcttgcataagtagagcccgtcagcggatttttcagttcatcaagcgtatagccgacggcaagtttcgccgccattttggcaatcggatagccggtcgcttttgacgcgagagctgaagagcggctgacacgcgggttcacttcaatgacatagtactgtttgctgaacggatccagcgcaaattgaatgttgcagccgccgaccacatccagcgccgaaataatcgccaggcttgctgaacgcagcatctgatattcttcatccgttaacgtctgggacggtgcgacgacgatggagtctcctgtatgcacgccgacgggatcgatgttttccatgttgcagacggtgatgcatgtatgattgctgtcacgcatgacctcatattcgatttctttaaatccggcgatgcttttttcgacgaggcattggctgatcgggcttgctaacagcgcctgtttaatcagcgtctgaaacgcttctttcgttttcgcgattccgcctccctttccgcctaacgtatacgccggtctcagaataaccggaaatccgatagactcggcgaaacggagggcatcttcttcgttgtcgacgatttcgctttccggaacgggctgatcgagctctttcatcagggcgcggaactgctcccggtcttcgcctttttgaatggtttccaccgatgttcccaaaagcttgacgtgatgcttcttcagcacgcctgcttcttcaagcttaacggctaaattcaatgccgtctggccgcccaaattggcaagcagaccgtccggtttttctttttcaataatggcctcgatgctgtcggttgtgagcggttcaaaatatatttcatcggcaaacgcctcatccgtcataatcgttgccgggttgttgttaactagaataacgcggtatccttcttctttcagagccatgcagccctgcgttcctgaataatcaaattctgccgcctggccgatgatgatcgggccggagccgatgactaatatgctggaaatggttgtatctttaggcatgagcgatttctctccttgctggtatcactttctctagaaattcatcaaatatccactcgctctcagccggtccgggatgagcttcagggtggaactggacgcttaatacgggaaggcgcttatgaatgagcccttccaccgatgtatcattgacatgatgaaatctgatggacagctcgttttcgtcaattgatgcttcatcaacgacatagctgtggttctggcttgtcataaacacccgtttcgttttccggtcaatgacgggatggttggcacccctgtggccgaacggcagcttatacgtatttcctccgaaagccagggcaatcagctgatgcccgaggcaaatgccgagtgcggggaaatcactgagtaatgatgtaatccggttcatgtacggcgcaatcgctttcgggtcgcccgggccgtttgagagcacgattccgtcaggctgaatgtcgtaaacagcgttcatctgctgatacggaatgaccgttactttacagccgcgctttacaagtgacgaggcgattgattttttataaccgaaatcaatcagcgcaatatgccggtctccgttccccattgacgtgatgtcttcagactgcgccagctccgccgggttttccgttccggatgctgccggaatttctcctgttgttgacacggcagcgttcatcgtgccgccggagcggatggttttgacgacggcccgtgtgtccacttcggttaagagcgggatgttccatttatttaaatactctctcaagcttgagactgcttcatggtgagaaaaatgttcacacgcttcatagacggcaacagccttgacttgaggaatcttactttcaaggtctttttcattaattccgtagtttccgatcagcggatacgtaaagacgacgatctgacccttatatgacgggtctgtaagcacttcctgatagcccgtcattccggtgaaaaaaaccgcttcgccaacacagcgggcctctttttcaagttcaccgccaaatgatgttccgtcttccaatactaaatagcctttcatctaaagcccacctcttgatgaataattaattaaaaatatgaatttttatacttttatatcgaaaaaaaattaccgtttcactgccgaatgcgcttcgatcgctgctttcagcatactgacggccgacagcatttcttcttcagaaaccgtaagcggcgggagcagcctgatgacattcggtccggccggaagcacgagaagcccgcgttcctgcagatctccgatgaggccggacacgggacctgcgcattcaatgccgattaataacccttttccgcggatttcttttacaaaaggtcctgtcagttcacggttcagctgcgcttttaaaaatgatcctttgtctgccgccgcctgaagaaagtccggctgaaacacaatatccaaggttgctttcacagctgccatggcaagtttattgccgccgaaagtcgtaccatgcgtacccggcgtaaaggcgtcgccaagcttctttttgccgatcacggctccgacgggaaaaccgtttccaagccctttcgcagcagtgatgatgtccggcgagatgccgaaatgctcatagccgaatgccttgcccgtccggccgattccggtttgaatctcgtctgtgataagcagcgcctgtttgtctttgcaaaatgtctgtaaggcttcgatgaattccggatcggcgggattgactcccccttctccctgcaccgtctcaagcatgacggcggcgatatcatcctcttttgaaagcgtgctgaatgccgacggatcattgaacggaagatagtgaaagccttgaagcatcggtccgaaaccaatcttgattttgtcttgtccggtggcggccatccccgcataggtccgtccgtgaaaggattgatggaacgttacgatttttgtctttcccgttgctttacgggcaagcttaatggcgccttcattcgcttcggccccgctgttgcagaagaaaacgagatcccccgcgctatgttcggcaagctttgccgcggctttttcctgaagatcattttcaaacagattggaaacgtgccatacactgtcaagctgttctttcaccgcttctgtgacctcatcatgacaatggccgagattggaaacggcgatgccctgaataaaatcgagatacgtttttccgttttcatcctctgcaattgtccctttcgcttttttgatatcaatgggccagcggctgtaggtttgaaatagactgctcatgacacgctctccttttctttgacaatttttgttccttggaaggcttgatcggtaaaaaacgctccttttccgtttacgatcatcacttcctcgacatcttcactcagtgccgataatgccgagtttaccttcggaatcatccctcctgaaatcacgccgtcatctatgagggcgtgagtctcttgcggcgtcaaagtatccagcctgctctctccgtccataattccttcgacatccgtgacaaataaaagtttgtcggcgtgtaaggctgaagcgacggccgatgccgcggcgtctgcgttgacgttcagcgtttcgaaatcacttgtcatggaaagcggagcgataacgggaatgatgccttctttcattaatgcgtgaatgattgacggatcggttttttgtatttcgccgacttctccgtatttgtcttgattaagataggatgcttgaaggagaccgccgtcctttcctgatattcccgcggctttcagcccgtttttcgcgagttcggttacgaaaaatttattgatcgtccctgacaagaccatttccgctgtttccagcaccggtttggtcgttttccgctgtccatcgacaaattccgtttcaatctgcaatgttttcagcattcttgaaatgtccggaccgcctccatgcacgacggcaatgttccagccggattgcataagctcttttacattttgaaaaaaatcggcggataactcgcggattacgctgccgccgcacttaaaaacgatcgttttcttcatgccgctcccctttgttatgtgcgatagctcgcattgattttaatataatcataggttaagtcacagccccatgcccggccgctgccggagccttcctgcaggcggactgcaatcgtaatttcatcacctgataagtactccttggcatcagtttccgaaaacggctgaggttcgttgtgtttaaacagacactggccgccgaggaaaacttccacttgttcggccgttacgcttgccgcactgtgcccgattgcgccgatgatgcgcccccagttggcgtctgtgccgtaaacggcggtcttcacaaggcttgagccgacgatttttttggcgataatattcgcctcaaggttgtttttcgcgccttcgactctggcttcaattaatttcgtcgctccttcaccgtctctggctatatctttggcaaggtcttcgcatacaagctttaatccctttttaaaagccggccagtcagggtgctgctccgtcaggcaatcattccccgcgcagccgtttgccatcacaagcaccatgtcattcgtcgatgtttctccgtcaacggtgatttggttaaatgaaacatccgtaatctctctgagcgcgtttttgagcgcctgttcttccacggccgcgtccgttgtgacaaagccgagcattgtcgccatgttggggtggatcatgccggagcctttcgccgctccgccgatcgtgatgatgtctccgccgatcaccagttcataacacgtctgtttcgtcactgtatccgtcgtcaaaatggcttcttcaaatgctccggacacggacggcgcttgaccgagctgttcaatgcccgcttgaatttttttcatgtctaaaagctcgccgatcaccccggttgatgaaaccgcaacaagctccggctcaatgccgagctggctcgcgaagccgtcccgcatttcataggcgtcctttaatccttggtctcccgtacaggcgttggcaatcgcgctgttgacgataaccgcctgaagcacaccctcttttttcaggctggcttgcgtcactttcagcggcgctgcctgaaaatggctctgcgtatataccgctgcactgactgcaggcgcttcgctgataatcgctccgagatctttttttgaatagcgcagaccgcaatgcacgccctttgcctcaaaccctttcggcgaggatacgccgccttttattttcgtgatttcctcactcagctgaatcatatttttgaatccctctttcgttctatggatagactggcgtcatcgtaagtcccgtttcttcctgccagccattcatgatatttaaattttgaaccgcctgccctgcggcgcctttcatcagattatctatgacagaaacgatggtggcacggtttgttctttcatccacggtgacactgatatcacaaaaattgctgccgtatacctctttcgtcgccggaaattcaccttccggcctgattctgacaaaatatgaatctttgtagaattcggaatacaatcctcttacctgtgcagcagacattcccggaggggcgtcggtatacatcgtcgccataatgccccttgtcatcggcgccaaatgagcggaaaacgtgatcgggcctgtgccgggctgccaagccgctaattgctgttcaatttccggagtatgctgatgctcattaaccttataaattttgaaattatcattcagctcagaataatgagtgcccatggatgcttttcggccggcgccggatacgcccgttttcgcatcaacaatcagaaatgaatcttgtaaaagcttattcttcgccagcggggcgagcccgagcagcacagccgtcggaaaacatcccggattggcaatcagctttgcagtctgaatctcttctttttgcagttcagctaaaccgtaaaccgcgctttgaatcgttcctttcggagcggccttccgcttataccacttttcatacacggccgggttttgaatccgcagatcgccggatagatcaatgaccgggatgcccgcctccgccagcttgggcgaccactctccggaaacgccgggcggcgcggctatgaacatgacatcaatttcgtttcggatcgtttctatatgaagcggctgaagtgattgtgacgctatattcctcaaatgcggatatgaagcggcatattcttttccttcgtcgctcgatgaatataatatacaatcttctgcataagggtgatggttaagaatcctgacaagttcggcgcctccataaccagtcgcgcctataatacctattttcaacgggttcaccttcttggtttttgtgaaattatttaacattataacatgaataaaaattaattcaattgtatatttaatattttttcattcattttccatctgttttcgctgacaaaaaaccccctctcgatcgagggggggcataaaaaaaaacaggctgctcggatcagcctgtttttttcagcatcatcagcccgcttataaaaaacagcacggagctggcgtaaaaaataatataaaccgtaaagaaatcagcgagaaacccgccgagaataatggcggcagctgaaaatacggccgtccagaaatgatagctgccgactttttttccccgctccccgccgtcggtgtaatcggcgatcatgattttctcgccgtgtttttgcatggcgccgaacaggcccaaaagcacctgcacaacataaacctggtgcacgccggtaatgtgcgggagcgtcagaagaagcaccgccatcccccacgaatttgccataaggaaccagcgggaatccagtcttgccgacagccggccgagcagcggatgaatcaatgcgccgctcaggccgaacaagccgtatgaaagaccgaattgcgtgtagctggaaccgatgtttttaataaataaaatataaaacggaaagatcaggctgccggcaaaaaagacactgctctgagacaggatcagccattttaaatggttgtgtttcatgatttgtacctctgataaaaataattcataaacaagtcatccggatcatatttgtgttttttctgaaagaacatatcgcttttcggatatgcctcgcgcatctgctctttcgtttgatacagcatatacgggagataataactgccgcggtggcgcaatgccgtatccgtcatttttctgacaatccgcgcagcactcgcctggctgtctgttgaaaacccttcattgattaaaagaacgagtgaaaacatgtcttcctttgcgtatgacagatcggctttttcatttttttgcacgtaacggatcgtaatatttacgagattgagatcttcatgtgacagcgtcttgcgtaaatcatgaatgtacggcgcaaattcgcccacgggcacgaagtattcttgtagcacgtcggtgttgtccgtgttttcatattccaaaaatttcgattctgaccgcatgacattgttcctggagactttcacgccgttttggctgagaaaataagactgctgggttgaccagaaccaatttcttccccagtcataccggcgggagaggccgagcgcgaatttcgtcagcgccggatgctcatcttctttcagttcattgtgccgttttaattctttctggttgtctgagagtgtgtaatcagtcacatacatatcgtgcaaaaagcctttatcccctgttgcgatccgcgcgagatgcatgcgcacggcggggttgcgctgaacatgctgcgtaaaatattgactgtatgtatcagcgttcatgcgtttcgttttcatttcataaagctcatcatccgtcagctcaatatccgcgtcaaggatgacgccgaacaggccgtagccgccgatgacggctgaaaacaggtcatctttcggagtaacggtgatgactttgccgtccgcctttaaaagatgaaacgatttgaccgtatcaatcagcgaaccgtaccggatatcccggccgtgggcgttggcgctcagtgagccgccgatcgtaaaaatgttttgcgattgcatgacttttaccgcgagcccgtacggattgacatagcgctgaatatcattccacgtcgctcccgcctgcaccctgatgatttttttctttcggtcgagaccgagtattttgttgtagcccgtcatgtcgagaacgataccgtcttcataatacgtctggccgcccattgagtgttgggcgcctgcgattgagatcttcaaatgctttctctttgcttccttaatcgtttcgaccaatgtttctttctcttttcctttgaccgtctgcttaattttcacgggcatgagacggctgacatccgtcattgtccctgcctgccgctccggctctttgtgaaaggcggaaacagcgaatagcgccgtataaacaagtatgctaaggataatgagaagtaattttttcttcatggattcctccctcgcatgcagccggtctattatatcatgcctcacgtccgtttttttcctttttaacccgataccgcaaaaaaccccgaatggtgggaaactcgggtttttttagtgacttgcccttctttccgcacgccggtctctagcggcaaagcagacagaatggcgcccgacagaagaatcatgtttagtacagctcgaaacggtcagccggaaaacaccgggcataaaaatccacagaaatccttaaaatgattttttagtcagtatataatcgatatatatgcagatgtattaccaaagggattgtttaaaacaaacatgttaaacgaggtggggaaaataaacataaaaggaatcaatcatcttcttttttctgtttcaaatttggaaaaatccatagtattttatgaaaaagtatttcatgcacaactcttggttaaagggcaaaaaacagcatattttgatctgaacgggctttggcttgcacttaacttagaggcggatataccaagaaatgaaatacataaatcttatacgcatatggcctttacaattgacccaaaagattttgatgcaatacatcaaaggttaaaaaatctaaatgtaaatatattaaatgggcgtcctagggataagcaagatcataagtcaatttattttactgatcccgatggacataaatttgaattccacacaggtacactccaagacagactgtcctattacaaaaaagataaacctcatatgaaattttatatttaaaggtttgtttgcgatccaaaacaaaccctcactgtcgcttatccgcgttgattttttccttgtaaatgcagacaaaagaaaagcacctccaaactttaggatgtacctaaaatccgaggtgcattttcttattactgaatccctaatgcgatttttgcgtagcgtgacattttgtctcttgtccaaggcggattccagacgatgtggacctccgtctcttttacatccggaatgtcggcgagcgcttttttcacctcgtcgacgatgatcggagcgagcgggcaccccattgatgtcagtgtcatcgtaacatgcgtcaggccgtcgtcatccatatcaacgtcgtatacaaggccgagattgacgatatcgacgccgagctcagggtcaacaacctgctccaaggcgcccatgatgttttcttttaatgcttcttccacgttccatcactcctttttcctcagtataacgtaaaagcgggttttgttaacacctttgtgctttataaatgcttatcgaaccaggcgacggtttctaaaacggcgtatctcgggactttatggtcagcccgttcgtctttcagaaactgaagatggtcaggccggctgctgtaatgaggtttaatcgtttcataaaaaccgcgggtcggtgcatacggaacgactttgtcttgaacgccgtgccagaacagcagcgggcggctgcggagtttttccggttccagactgagatcgaacggtttgagccgtgcaaacagttcatcgacctgttcttttgtgacgtcaatgtcgatgtcctgcttttgaatgtggtcaatctgctgctgaaaaaatgccgtatagttcgggcttcccatcagactgacgccggctttgacccaatcatacgcggccatcgcgccgaatgtcgtaattccgcccattgacgtgcccgcaagaccgatccgcccgtcttcaatcagacctcgcgcttcaaaatcctttttcagcacgtcaagctcctcgatttcatttaatacaatgtcccaaaaatggacggcgagctcttctgctgacagctgttcagcgcgttcaccgtggtaaagagcttccggcagcacggctctgaagcccttttcagcaagcaggtaagcgaaatgaagattatgctccttcgcgcttgtaaaaccgtgaataaagaaaacaaggggagcgggacggtcccgattttcttcttttacaatatgtaaaaacggaatgcctgatacggtttggtgatcaattagaatcacgttgactccctccttaggataaccataatcataagtgtaacatgtagacaataaagatggtaaaaagctacactgtacataagtgaaaaacagcaaattatatgacaaaaggagttatttatggagacaaaaccttatctcatcgccttagatctggatggaactttattaaaagacgataaaaccatttcccctgaaacggcacggacgattcagaagctgaaagaagcgggccatcatgtctgcatctcaaccgggcgcccgttccgttccagttcgatgtattatgacgagcttgggctgacaacgccgattgtcaattttaacggggcgtttgtccaccatccgaaagacgaatcatggggacgctaccacacgtctttatcggtcgatgtggtcagacagcttgccgaacttacagagacctatcaaatacataatgtgctcgctgaggtcattgatgatgtgtacttccattatcatgatgagcatttaattgaggcgtttcatatgaatacggcgaatgtcacattcggcgatctgcgtgaaacggtcaaggaggatgtaacgtccgtattgattcacgcgaaggaagaggacgtcgcggacatacgcgcgcatttatccgatgtgcacgccgaggtcattgaccacagaagatgggcggctccgtggcatgtgattgaaatcattaaacacgggatgaataaagcggtcggcctgaagaaaatcagcgactattaccaagtgccgagagaacggatcatcgcgttcggcgacgaagacaacgatcttgaaatgctccggtttgccgggtgcggcgtagcgatgggaaacggcacggatgaagtcaaacaggccgccgaccgcgtcacgggatcaaatgaagcggacggaatcgccgaatttttaaaatcctatttctccctgtgaggttttgccgctcataacacaaagccttccgcccatactaaaacagacgactcatctcgtctaaatatggaagggggacattgcaatgggtaaacgaaacaaatcaaaacggtttattcagcaaggcaaggactctgtcagtcttcatgacgcaagatttccatatcggtctacattagaggaagcacagcatgatgcagcaaaagattcggctgaaaggcaggttgacttttaatgagaaacgaactgttttctcaagccaagtcatttgtccagcaggccgtcatgattgctaacggtttcgaggacggcgatcaggaaaaagctgtctcacgcgccaaaaacgccgtgtcttccgcgtacgccaattcgacggatgcagaacgtcagcagctgcaccaatttcaggatcagctggagaaattgcaataaaaaaaggcgccccgtttagacgagggcgccgcttttttatttcacttcaaatgtttttaccgttttcagtctttttccgatctgatcggacttccctaaaaacgtcaccgtcaccgtgtatgttcccggaccgggcacgttcttccacacatctgaaaagtcatacgtttcattcggcattaaggtcacggtctgaaacgcctgagtaaacattttgtcttttgaatagcggtacagttctttgtgatgttggtcatgtacggtcaattcgaatttctgccctgaactgaatgtgaaatcgatcgggctgccgctcttgttttttaaagacatttgaaattcgatctgctgatccgtctgcacaggttttacggctaattccgcttgctgttcattcatctctccggatacctcctcagcgggctccttctgcccggattgactgctgcatccgatcagtaaaatgaccggtaataacaggccaaacagccacttcattctatccgctcctatcagtcttttctgaagaaaccaaagatccccgtcgtttgcacgatgtttgtgaaggctttcgggtcgacttctttcacgattttctcaaggtcatacaattcgtaccgcgtgatgacgatgatcatcatttctttctgttcgtttgtgtaagcgccttttgccggcaccgtcgtaatgccgcggaccattttcccgtaaatcgcttctttgatttcatcggctttttttgtaacgatcatggcggtcagtttcatgtggcgggtgtgaatggcgtcaatcacccttgttgtgacatacagagcgacaagggtatataatgctttctcccatccttgcaataatcctgccgtcaaaatgataatcccgttcaaaatgaagaaatatgtgccgaccggcttatccttccatttggccagcaccatcgacacgatatcaagaccgcctgtcgaagcgccgaatttcagcgttaaaccgatgccgatagccgagatgactcctccgaatacggtattcagaagaatatcgtgcgacagtctcatttccgggagaattcccataaagacggacgtcagcgctacgcttaatatgctgtatacagtgaatgatctgccgactttcagccaccctaacacaccgatgggaatgtttaagaggaacatgagaactcctgtcgaaatataaaagggggcgtattgatcaacgacgcttgacagcagctgggcgacaccggtaaaaccgctggcatatacattcgccggtatcaggaataaattcagtcccgccgcatacagaaacgcgccgatgacgacgattgctaatttttttgcttgttctagtaccatggcttgctcctccgctcattttcattattagcttttcccttaaaataaagttttgaacactattttgccacatttatatgatatagttggcatcactctcaccaatcggaaagaagggaattatgatgacagttcaccttattgctgacagcgcctctgacctgccgaaatcttatattgaagaaaaccggatcgggttcattccgctgcacgtaacacttgacggaaacgaatatgaggacgcggtcaccattcaggcggatcatatatttcaagcgatgcgggacgggaaagttccgaaaacatcccaggcatcaccggatacgataaaaaaagtatttttacaatacgcggaactcggagaaccggcgatatacatcgccttttcctcaggtctttccggcacctatcagacggccgtaatgatcgccaatgaagtaaaagaggaatttcccgattttgatttacggattgtagattccaaatgcgcttcattgggctgcggccttgctgtgatgcacgcgcaaacactctgtgttaacgggaatacaatacaagaaatcgaaacgtctgtaaagagcttttgcgcacggatgaaacatatatttacggtcgatgatgtcgcttatctcgcgcggggcggcagaatttcaaaaacgtccgcttttgtcggggggcttttgaacattaaaccgattctgcatgtggatgacggcaggctcgtgccgctcgaaaaattgcgcggacagaagaaactgtttaaacggattatagacatgatgaaggaagaaggcggcgattgggcggatcaaaccgtggggatcagctatgcagataacgaggagacggcgcttcggatgaaggaaatgattgaagaagcgttccatccgaaagagatcattcttcattcaatcggctctgcgatcggcgcgcactccgggccgggcacgctcgcgatttttttcctgaagccataatttcaatgcgggcgggcatcctaacggacagaagggaggctttgccgcatgaaagatgatgacaaaaaaccgttggacaataacgccgtaaatcagaaaaagaaccggcttgccgaaaaaaaccggcaggcgggaaaaaaccagaattccaaaaaaccggaccatctgtaaaagcaaaacagccctcttgtgtatgaagatagagggctgttttttgttctatatgcgtctaacatcacttatcacgaatccgctttcaggcaatgccggcattctggacaggctgaagctcaaatcttgggacggaacaccgtactctatttcattggcaagaaacgcaagggaagttttcatgacttccacggtcattccctcacccggacagcggtggccgttagccggatcacctccgccctggggaatgaaatcaaatttattttcctcccgcccctgaaaacgttctgggcgaaattcattgggatcctcccaaagccgggaatcatggtttgtcccatataggtcaagcatgacggatgcaccctttttaaactcacagttcttccatacgaaatcttttttcacaacggctcctaaaaacggggcaaacgggtaataccgccgaacttcatgtgcaaatctttcagcctcctgatcatctctcgatctcagtttgcaccgatattcagggtaatcatgcaatgcaagagctgaaaacgtaatgaagtaagaaatggcggcaatcgggcgcagaacattaataagctcaacagcagccatgtgagaatcaagtctgttcccgtcaagttctgtatgaaaagccatttcatacaaggctgagcactccggcgtttgcagcttgccggaccgcacatcctcaatgacctcctctatccatttctccgttttcagcctcgcccttctgcctttccaatgacgcggtccgacagcgccgaatgcgtctaccatatcggtgaaatcctccgcccgctctttcacttctgagtctttcagcgggacgccggcccactcacaggcagcccggcacagcactttcttcgcttcatcaaaaaggacaattcgatttgaaccctcccacttttccgcagatgctttccactgttttgccaccgcttccgcaagccgtttttgccggggcggcgtcaacagcgacataaatagaagcttcctgtgcttatgccgttcaccgtccattgactggattgcccctgttccgaataacgttttctgcacccgtttggggagggcatgctcccgctgaaatcgttctgtgtcataaaaaagctttgcggcttccgctccgctcatacaaatgaatgtcttccctaataaacgggcgcgaaacacatccgagcgataagtctccgctctgtttttcacaaatacatatccatcgcgtaataaagccagactattatcaagacccttatcatgcggaatttgttcattcatcccgattcctcccttcttttttcaccttttacgaaaaagaataaatataaacacaagtatattcagtatttgtgtttcattcagaagttactcatgtcaggctgcaaaaatcagggggcgggcataagcccgttacaaagtaaaccggcggacctgatcgtttaaccgctctgtcaggctcaccagattattgacgctttccgccattttatgaaaagaagacagctgctcaagcgcggaggcagaaatctcttcgcttcccgcagctgtttcctgaacgacggcgctgatgctttcggcatgatgcagcacttgctcaccaagctgtttcgattcgatgatccgtccgtccaattgagtaagctccgctttaatatgggcggctttttgttcaatatggacgaatgattctgacgttttctccatcagctcctgctgtctgtccgctaaagcgacgccggtcgtgacagctccggtaatagatgtgatgccgtcttcaatttgctttaccatatcgaaaatctgcgcggtcgctttggctgatccgtctgcgagcttccgtatctcctcggcaacgacggcaaatccttttcccgcctcgcctgctctggccgcctcgattgcggcgtttaatgacagcagattggtctggcccgcaatgtcagaaacggtctgcgccatcatactgatgcctgccgcatgctctatgaagagatcggcggcttcggaaatctcttttgatgtctcattgcttttatcaatggcttgcttggtctcggctaaagcaccgcgccccgcagccaccgccgcaatcgtctcttcgctgcttctcgtcgtttgttttgaacgttcggcgttcgcctttgaatgttcatccatttgttcaatgaattgcactgcatgctgcagatcttctgaaatggtttgggagccttgcgccatttcttccgtcgacacggacacctgctcggtcatgtccttcagcgtctggttttccttcgtcaaaccttccgcgaaagtctcgacttcacggccgacctctccgatcgcctgaattaaggtgcggagctgttcagccatcattccgaatgagtcattcagctctttcagttcgtccttccctttataatcaagcatttcaacagcaaggtttcctcctgcaatacgacgggcattttcagccatgcggcggatcggccctgcaattctcttcgtcagcctgatggaagatatgacggtggcggcaagtatcacgatggtcagcacggctgcgctgtaaacgataaactgaatctggtcagccgtctgcttctgcatgtcttcatagtgatcccggcttttcagattcagcatataaatatcattcagaagaccgttgatgcgggccgccgtccttgtcgcttcagccgggcttttcgaatcaagagcagcgtccgcctccgcctgccatgattcgtattttttggcgagtttgtcataagcggctttgtctgcaccgtccgtcatcgtttttttgagcgccgccagtttgtctgagctgcttttcatatagcttcgcacatcttctttctgggcgtctgcgagcgtataggaatagccggtgatgctttcttttaacgtattaaggtcagcttttgcttcctggacgtttaacagcgcgtccacttcatcttcatttgaagcctgaatattcatcatgtttacgatggtaaagccgatgacggcggcgaagcaaatcatcgtaacggctgcgttaacgagcagccttgtccgtaatgtcacttcagatcgcctcctttttcaatcatactgtttttcatatccgtgatctttttcgtcagcccgcctgcgtttttgacaactctgatcttggctaagtccatgccgttttccttcagtccgtaaacgatctcaccgcttttgatctccttgttgtcttttaaatctttcgccaattcatagatgacatggtcgacgtttttcactaaagaagagataacggcgtgctcggcggtgtaatattgatcgctgtcaacaccgatggcgtatattttttgcgcctccgcttctttcagtgcgccgacacccgtgaagccggccgccgtaaacaggacatcggctttttttcggatcatgttttgggcgatgcccttcccgagcttatcatcgtcaaacgtaccgctgatgtccgacagcactcggatactcggtttgactgattccgcgcctttcagatagccttttttaaaccgtttaatgacgtcggcatctgaaccgccgataaatccgattgtgccggttttgctcgtcatggccgccagcgctccggctaagaagcttccttcatcctctttaaacgtgacggaggtgacattatccaggtctgatacggaatcaatcagcacaaaccgctgcttcggatattttttggcgaccttttctaaatccgcctgcatgctgtaaccgagccccacaacaagatcattgccttcccggacaagctgggtcagtcctttttcgtatgtaccggtatcttttatttcccgatagtcaaatgtgatgccgagctcgtctctcgctttcatcaaaccttgaaagcctgaatcattaaatgattggtcgccgaggccgttgtctgtcagcatgatgccgattgttttcgttttttcggccgccgtttcctcagatttgccgacacatcccgctgtgctgagcgcaatcagcagtacagccgcaaatatcgccatttttctcattgaaactctccttttgtttttttctatagttatatatcggttcggatgtcagaatattttatttcaataaaatatgtatgttcggcaggatgttaaacaaatgagggcataggagcttttgagaaaataaaaaacatcggttttggttcaccgatgtttttgcagaaaatttattgtttttcgtatgtccagccgtcttcctgatagaccttgccgtttttcatcagatgcccgagcgcccgcttaaaggcggctttgcttaaatgaaaccgttcgcggatatcgtcaggatggcttttgtctccgtaaggcatcgcgccgtttcttgatctcagataggtcagaatttcttccgcgtcaaccgaaagcgcatcctgctttctcggcagcagtgacatgttgacggagccgtcttccttcacctcgatgacacgccctgtcacgcggctgccgagtctcggctcttcttttctttctgaagggtgaataaacgcgcggatgccttcatcggtaatcagaaaagagcctgatgcaatcagtctgtacaccgtgcccgtcaggtctttattcatgacgtcttcctctgcatccgtaaataattcactgatgatatcttcaggcgccggcttggcaaacatgcgtccgcggcttgtcaccttcagcatgcaatacagtctgtcgcctttttgcggccagacggatttgtacggaggcaggtgctccgttgcgacgagcgcgtcttttgacagaccgacgtcgacgaatacgcccatatcctccacagcgtccgtcacttccacccatccgtagtcataaaagctgatgagcggctttttcatcgtcgccgcaagtctttcctgatgatcgacgtaaataaatacgtccacttcatctctgtcttcgatatcctctgtgatttcactgttatgtaaaagaaccgtatcctcgccgtcggttaaaaaataaccgaaatcggtttggtgatctatactaagcgtgagctgctgccctggtctcatgttatcgtccttcctgattcgcccgtatgaggctgatgtttttctcattttttccaacatgcataaattcatgctttatgctgttggacatttctctttattctactataatcaactcataagtgaaatgttataggaggttttctcatggcaaaagaaagttcttttgatattgtatccaaagttgaatttcccgaagtgcagaatgcgattcagatgacgctgaaagaaatcggcacgcgctatgactttaaaggatcgaaaagcgatgtaactttagaaaaggaagaactcgtcctgatttctgatgacgagtttaaactgaatcagctcaaagatgtgctgagcggcaagctgatcaaacgggacgtgccgacgaaaaacattgaatacggcaaaatcgaaaatgcatcggggggcacggtgcgccagcgcgcgaagcttgtacagggcattgataaagacaacgccaaaaaaatcaacgcggtgattaaaaactccggcttgaaggtcaagtcgcagattcaggacgaccaagtgcgcgtcaccggaaaaaataaagatgatctgcagcagattattgcagccgtccgcggagcagacctgccgattgacgttcaatttattaattttagataaattatgtgattcctattgattattgtctctattttcggtaaatttggagaaagggatttccacagttaagttttggaaacccataacaattacatgaacgttcttatcaagagaagctgagggactggcccgacgacgcttcagcaaccggtgtagtggtttacccaaaccatgaccaaggtgctaaatccagcaagctaaaaacagcttggaagataagaagagagacaaatgattacaaagtcttcttcttaagaagactttttttatttctcttttttccttgctgaatgtgacgaaggaggcaaacaatgggactattacaagacttaaaagaacgggttttaatcggagacggcgcgatgggcactctcctctattcctacggcattgacagatgttttgaggaactgaacgtatcaaagcccgaagagatcaagcggatacataaggcttacgtggaagccggggcagacatcatccagacaaatacgtacggcgcgaattttattaagctctcaagatacggacttgaggacgaaacgaaaaaaatcaatcaggaggcggtcagaatcgcgcgcgcttcctcagacggcgcttatgtattgggaacgatgggcggcatccgcacctttaacaaaaacgcctacagcctggaggagattaaacgcagctttcgggagcagctttatttattgctgcacgaagagccggacggtctgcttctggaaacatactatgatttagaagaggcgcgcgaagtgctgaagatcgcgagaaaagaaacggaacttccgattatgctgaacgtatccatgcacgaacagggcgtgctgcaggacggaacgccgcttcgggaagccctcaggtcaattgccgatctcggcgctgacataacgggaatcaattgccggctcggcccgtaccacatgattgaagcgctcaccgaagtgccgattttcagtgacgcttatttatcggtctatccgaacagcagccttccgtctttagaagaaggccggcttgtttatgatacggacgatgcctatttccgggagagcgccgtacagttccgcactcagggcgcgcgcattatcggcggctgctgcggcacgacgccaaaccatatcagagccatggctgaagcggtccaaggactttctcctgtcactgagaaagaagtgaaaatcagacgggaagaagaagtcatctcagtccgcaacgaacggaccgagccgggtttaaacgaaatcgccgctcaaaaacggtcaattatcgtagagcttgatccgccaaaaaaattgaattttgacaaatttctgcaagcggcggctgaattaaaagaaaccggcatagaagcgctgacgctcgccgacaattcattggcgacaccgcggatcagcaatgcagcctgcggttcattgctgaaagagcgtcttgatatccgttctctcgttcacattacatgcagagaccgcaacatcatcggccttcagtcacatttaatggggctggatacgctcgggctcaccgacattttagccatcacgggtgatccttcaaaaatcggcgactttccgggggctacctccgtctatgatttaacgtcctttgacttgatcaggctgattaaacaattcaacgagggcatttctttatctgggaaaccgctcggcaagaaaacgaacttttccgtagccggagcatttaatccgaatgtccgccaccttgataaagcagtaaaacggctggagaaaaaaatagagtgcggagctgactacttcgtgtcccagcctgtctactcggagcagcagctcattgacattcatcatgaaacgaagcatctcaaaacaccggtgtatatcggaatcatgccgttaacgagcagccgcaacgcagagttcatccatcatgaaatcccgggcattaagctgtcagacagcatccgcgaaaaaatggcgctcgccggcgaagacaagcggaagcagaaagccgaaggcctcgccatcgccaagtcgcttctcgacacggcgtgcgaactgtttaacggaatttatttaatcaccccgtttctccgttctgatttgacgtcagagcttgcagcttatattaagcaaaaggatgaaaagcgggctgatgtatatttgcattgacgcgaaagaggccgcctgatatgacaggcggctttttcatggtacgatacagaaaaagaatcaagcaaaggaggattttttcatggttgaagtaaaacccatcaccgcagaagacacatacgcgatcagacacagcgtgctgcgcccccatcagacgattgaggattgtaaatatgatcaggacagcgtcaaaggagcctttcatctcggaggtttttacgacgggacattgatcagcatcgcttctttctacccgcagaaccagcaggcgttacaggcagcgcccgcctatcagctgcgcggcatggcgacgcttgaggaataccggacgcaaaaagcgggaagcacgttaattgcctatgcagaacggaaactggcagatatgggggcggcgcttgtctggtgcaacgccagatgtcacgtaaagggatattacgaaaagctcggctggaaaagcacgggcagcccctttgacatacccggcatcggcccgcatgtgatcatgtataaagaactcgcctgaaacagacaaatgcccttggggacatgtctctaagggcattaccttgaatgtcacgcctgcttttatatgcggtactattgacgccctcccgcttttttaataccctttgtacattacgcaacagcaaggatggcaggcagaaaacgatatctgtcaattgccgttttcagctattaattcagaaaaggaagtatgagatgaatacgatccaaaaaccgaaaatcccgaaagaattgccggtgctttctttcacagaagcgcttcaggacgacctcataaaagaagtcgtcatagagaacgccgtcgtaaacagcaaactggacggcctgcgcgccgaaaaagtcattttcagaaacaccgtttttacggatgtctctttcagacatatggaatgtaccgatgtcctgtttgacaaatgtgatgtctcaaacgctgatttcagcggaagcatcatccatagaacggcgtttcagcattcaaaacttctcggcttgaatctggcggattccgccatgcgtcatgtacggtttgaagactgcctcgcaaattacagctccttcagctattccaatatgaagcatgtccggtttgacacgtgcgctcttacagaaagcgagtggaatgatgccgttcttgaatacacagatcttgacgcctgtgatttgaacggctcaaattttatcggcacgtctctttttaatatggatatcagcacgtgcacatttgatcatctgcatgtctcacttgagaagctgaaaggatgccgcatctctccggcgcatgccgttacattcgcagaagcgctcggagccattgtgacgtgatcttttattaaacgaaacggcgggcgatgtccgctatcgtttgaatgcctttttccaagtccggtaaggatgcgtacgaataggaaagacgcaggctttgccggtcttcgggaagatagagagctcccggattgatcagcacgccggcatccaaggcacgggtgaaaagcgtctgaacggcgattgcttgatgaaaagtgacccaaaaataaaagcccccctccggcacacgccactccgcaatatctcccgcgtatctttcaagagaacgcaatgccgcatctcttctgattttgagttcctttctgagacgcaaaaggcgcgcttcatagcggccgcttgacagccattgacatgccgcccattgagataaagcactggagccgtaatccgtctgcattttaatatcggcgagcctgtctgcaaccggctcaggggcgacgacccatccgatgcgcagacccgggcttacggtttttgacagcgtgccgatatacagtacattcccctcaccgtccatcgattttaacggaggcggcggttctttatcgatccataaatcaccgtatgcgtcatcttcaatgacaggcagacggtgatttcttgcgagcgcgatgagttccttccgccgcttaagtgacattaccgttccggtcggattatggaatgacggaatggtgtacagcagccctgcttcgtattgccgccggtaagcgggaagatgatccgttttcattccgctcccatccatcggcactcccttaagcctgacgcccgctgattgaaacacacgcagggaatggagatacgacgggttttcagtcagcatgacagagtttggttttagcagcccgattgaaatgagctgaagcgcctgcagcgcgcctgagacgattacgatggatgccggggacgcgtgaatcccctttgttttcaaatgttccgcgacgctttgccgaagctgaaggctgcccttcggttcttcatagccgagcgcaaaaatgttagttcccgcttcacggaacagttcggccatctcctgctcaggcagcagctcttgactcagttcacccgtccccagcctgatcagatccggacgcggctcgttttgattaatggcctgaaccaaggctgaattcggctgatgacttcccgatgtaacgtatgtgctccaatcaaggggcttagccgctgccatgatgctccacgtattgttgacgacctttgtgcctccccctctttttccttccagaagaccttgggcgattaactcatcaactgctgccgtcactgtgcttcggttgacctgaagctcctcggcgagctttctttgtgagggaattttcgtgccgatggtccattcgccatgaagtattttttcttttatatgctgttcgatctggagataaagcggtatgtgcgactcccgatccggacgccagctgttcatacgtcatccctccttctttatttattatacatttggctggttcaagtaccagccaaatggccggagacatcagcacacagtgcggctacaatgagatttagttgacgattggagggttttacgaaatgaatgcgattcttcacggagtgatgctcgctttcggccttattttgccattgggtgcgcaaaacgtgtttatttttcagcagggagcctggcaaaaacatgtgtggcaggcgtttcccgcagtgattgccgccgcggtatgcgatacgattctcatcagcgcggccgtcgcaggcgtgtcaatgattattgcagagattcccgtttttcagaccgtcatgcttataggcggctttttgtttctcagttttttaggctggcagacttggagaagcaaaccgcaggccgaacaggcgagaaaaacggttttcacggcaaaaaaacaggcggtcacggccgtcatggtatcccttttgaacccgcatgcgattttggataccgtcagtgtcatcggcacaagctccgccgcctatccgggaattgataaatggctgtttgccggtgcttgtatcgcggtttcctgggtatggttcgccggactggcattcgcgggacggctcgttcaaacggcggatacaggaggccggctcctcggcatcctgaataaatgctcggcattggtgatgtggggtgctgctttttattttgcggcgcttttgtttcgataaaaggaattcggccaggccatgttgaatgtaccggaaggaagagggggaattggaatgtcagacattttaaagctgtatcactaccacagatgggcaaatgagcaagttattcagcatctgaagacgctgcccgcggtcagcttacagcagaaactgaaaagtgtttttccgactgtgaacgccgtgcttgtgcatatataccgggctgattacatttggcttcacgtgctttacggagaaactttcgaacaaatcgtctcgcagtttgatcaatttgaaaagcttgacggagattttgaggcgattgaacatagaatgactgaactggacaaagaattcagcgaatttttaaaagaaatggagaacccggaaggtccgatctctatttctcatccgcgcctggggacgcttcagacgacatatgccgatgtgatccggcatgttgtgaatcacggcacataccatcgcggcaatatcaccgcgatgcttcaccaaatgggctataaaggcgtgccgactgactacatttttttctcatacgaatcataaaaaagcaaaggcctcccgggcctttgcttttttacttcgaatctatcataatccgatatagctggagacgcccgctttttcggccacatcgtaaattgtcattttcatgcttactgatccctcttttgttctctggttttaggtcagtccgttttccggcttacgaatttgcggtattcaagcggcgaaatgccttcaatctgtttaaacagtttggaaaaataggttgggtcctccataccgatggcgtccgcgatcgcccccattttgtcattggttgcggacaaaagacgtttcgcctccgtcattctgactttgttcgtatactggccgggcgtgacgccgagcacctgctgcatacagcgggtcacgtagtcttggttgtaatgaagagccgaagagagcgctttgatggttgttttctcctgatagtgctcctgcaggtaccgggcggcctcccatgcgactctttcctttgcggacgggatttggaacgcttctttctgaagatggagcagcagctcttcaaacagaatctgctttctgagcggcagatcggagttctcggcgctgtcatctgtcagcacactgaattgcccggccataaactgcgggcgtctcactttccctttttgcggcagggacagccggtagcgggacggctcttcaaagctccctttttttcgcctcagctccgaccagttgttcccggttgtttccgtcacctcataagccgctccctcaaaatgaagccacgaataggatgtcgtttcttcactgccttttgtcccgtaatgttcaagcccgggagaaagcagaatatattctcccgcttcaacggaaaaggcgttttcgtcttctgtaatgtagaggacgccttctttcacatacagcagatcaaacaccgggaagacccgtctcacatgggtttcgccttttttgaacactccatctcccgcagcgataaagaccgggaacggaggaactgtgaactcgagaaaggacatattttcggccctcctttttaagtcggatttttgcaagaagtttcgtttctctccctttttattataagaaaatggaggtacacttttaaacgttgattttgtcaggaaaggggttaaaagaaatgaaacaagcgattttaaaacgggctgcgttcaaacaatcctctgatcacaaactctcattatacgcgctgacttggccgatatttattgaggtttcattatatatgtttatgggaaacgccgacactcttatgcttagccaatactctgacaacagtgtggcggccgtgggtgtcagcaatcagattttaaatttaattatcgtgatgttcagctttatcgcgacgggtacgacaattgtgatttcacagtttttaggatctaaacagaaaaaagaggcgcaggaagtggcttatgtatcaataggagcgaactttgtcatcagtctcgccatcagcgccgccatattttttgcggccgttccgctgcttcatgtgatgggtctttccaatgaattgatgccggatgccaaagtctttttgcaggtggtcggcgggctgtccttcattcaggctttgattatgacgttcagcgccattttaaaaagctacggtcatacgaaggatacgatgttcgttacgatcgggatgaatattttaaatattgccggaaactttcttgtcattttcgggccgctcggccttccggtgttaggcgtcgccggtgttgcgatgtcaacgtccttcgcgcgggtcatcgggctgatcgcgatgattgtgatcgtcaaaaaacgcatcggactcggtctgacatggcaaaagatttttcacgtccataaagagcacttgcggaaactcctgaaaatcgggattccgtctgccggcgaacagctgtcttacaatatttcgcaaatggttgtcacttattttatcgccattatgggcgctcaggcgcttacaacaaaggtttatacacaaaacatcaccatgtttatcctgctgttcggaacggcgatcagccagggtacacagattttgatcggcagatatatcggcgccaaacggtttgacgacgcttatgaccgctgcatgaaaagtctgtactgggcgcttggcattgccgctttgacatccgtgatcatgaccttgttttcaaagcagctgatcggaattttcacaagcagccctgacattattgcgacggcgagcatgctgatcgccatgacgatcattcttgagcccggccgttcattcaatgtcattatcatcaactcgctgcgggctgccggagatgcaaaattccccgtctacatggcgatgatttccatgtggggtatcggactgccgctcgcttatctgttcggcattcatttcggattagggcttatgggcatctggatttcatttatcgcggatgaatgggtcagaggcattcttatgtacagaagatggcggtcgcggatttggattcaaaaagggattgcatagacgccctggcttcgttatgaagccgggcgtttttttatgcttgtgaaagccgttgtctcatgtcaccgagctctgaccggtaatgtgccgctaaaccggtaacggcgggccttgagtataacggaaacagctccagctcttcagacgcctcctcgaaatacgcctcggcctcgaatgcgatgtactcccatacattcataaaagctttgttgacggtatggctctccagctcttcttccgtatagccgaattgcttcatcacctggcgcgggagacgctttttcgcccgctcatccgtatggacccccagaagcacccgggtcagctgaatggctgctcctaatgaaacggctgcatggcggagtttctcttggttccggcgcgcgcaaaccggcagcagaagcaggccgagggctccgcctgtttggcccgcgtacatcagcaggtcatcaaactcttgatacgttactttttctctgtcagagatttggccggcgataaactcacgtaacggctcttcttcaagcgcaaattgctgccgcacatcggcgagcgcttcccacaaaaagccgtcggcgcgtgccccgttcagaaagtcttgtgccgcctgttcaaatcccccaagttcctgcacatcaagccggtcagcttcgtgaaacaaagcaagcaccgcccatgcggcccgcctgttttttggcggcagggttgagaaagtccgtttatataaaggaaagtgcgcctcggcaagctgggcgcatgtttcgtattcggtcatggtatcactcctctgtttttagtgtaccatatgtttcacaataaaaagaccgatatccttcagcggaaaccggtcgcggcactgttattcttctatatcgatacggtacgcctcaaaccatgtatggatctgggcaagatgggcgatcagctgcgggcctttcatcagctggccgaaccacggaacctgaaaagatgaaccttctgtctccagcagcatttccagcttctttctgtcaagcagggtgtgaagcacggaatctttctgttgtaaaatcgttttcagccattctgtgaccccctgcgtgtatttcgggtgatgcgttttcggataagggctttttttgcggtacaaaatatcttcaggaagcagtccttcaagcgctttccgcaagatgcctttttcccggctgccatgcattttcatttcccaaggaatattccaaacgtattccacaagtctgtggtcggcgaacggcacccgtacttcaagacttgcgcccatgctcatgcggtctttgcggtcgagcagatttgtcataaaccaaagcatatttaagtagaacagctgccgtctcgctttatctgttcccgtctcaccgtctaacagcggcgtttccgcaatggtttcttcatatctcgcattcacgtattctctaagattcagccgtttttgccacttttcatccaagagcgtgattctctcctcagtcgacctcatccaaggaaatccgtcttcttctgctgcggtgtgaaaccacggatatccgccgaaaatttcgtccgcacattctccggaaaggctcacgacaaaatcttttttaatttccctgcagaaccatagtagcgaggaatccacatcagccatgcccggcaggtctctgacgagaacggattcctccagatgttcaaccagctgatcctgcgtaatcacgcacttatgatgctgtgtgccgtatgcatttgtcattttatcgatccacgggccgtcatcattcggctgaaaggcgctcgctttaaaaaatttgctgttctcctcataatcaattgaataagtatgaaggggatctctgccttgtttctcaaaatgagcggcggctatcgcggttatcgcgctcgaatcaagcccccctgataaaaacgtgcaaaccggcacgtcagatacgagctggcgtgtcactgcatcctgaaataagtaccgaatgtgagccgcggtttcatcgaagctgtctgtatgcttttcgctctttacattccaataacgccatatggacaaaccgtcctttgagaaagtgaacgcatgagcgggacgcacctcgtgaattcctttaaacaccccgcagcccggagttctggacggcccgagtccgaatacttccgcaagtccgccgctgtctgtgcgggctttcacatcaggatgagcaaggatggctttcaattccgacccaaacagaaaggaagagccgtgttctttataaaaaaacggtttgacgccgagccggtctcttgccccgaacagccgctcgcgcttttcatcccagatggcaaaagcgaaaataccgttcaagcggttcacgcactcctcccgccactcaatatagctgtgcagcagcacttctgtatcagaggtcctctcaaaacggtggcccctcgcctgaagctccttccgcagttcctccgtgttatacagctcgccattataaatgatggtgtacgtctcctcttgatgcgtgcaggccatcggctggcggccgccttcaatgtcaacgaccgaaagtcttttatgtccgaataaaacatggggctctccccagacgtttgaatcatcaggccctcgttttgaaagagtgtctatcatattgttcataatatgtttctcttggacgagctgcttttgaaaatcgacccaacccgcaattccacacatgtgatatcagctccaatcccgtttctgtcggtatcaaattcgtttctatcagcactttacccagtttatgcaaagaaacgcagatagttgatttgtcccactaagagttgtatgagacaagcccgatttggaaagaacggaagagaagaaacaaacaaaggagaccggcacggttatgaaacgaaaacagcttttctcagaaaaaaacaaatgggggcgcggcaccctgatgatagaggacggcatctgcctcgtcgaaaacgatgaaggcgatatcctgcttgcagacagtctaggaaacgcagacgtattgatgaaacgcggcggcagatggcagccggcacggatttgcggcggtgcggccgaaatcggcgcagacaccatccccctgctcggcggggaagaaatccgttatgaaaagccggtcaaacggccgctgttaaccttgctcgattcgctggacgatgaaacgtttctgctgtttctcagccatcttcacgggttcggcctgtctgtatatgattgcgtattttcctacaatcaggcgctgttttccggtgaaggcgtttcgttttatcacttctcggcggatgacgcacaatgcgccctgcagcatcaccgcggcagctcgggtaaacacgacagatttgaatggacggcatctgacgggcggcgctccattatgtattcagcggcaaaacaagacggcaccgcataacaaacaggcggcacttttaaataggtgccgcctgatggatttagctttgtttttcacgctgattgacgcccggcgtttgcttttaccctttacagccgtagcttttgcggtaacgagagtgattgacgctggcacagttgcgcaaaatgtatgcgcaactaaaaaaacccggatgcatccgggtttttcaagcgactgattaaaatacgtgaaagccgatcggcaagtgaaggccgagcagcaccgtcaggacgagcacgataataaaaccgatccacagtccgccggttgatttgccttttttcttacggatgacgagcatttccatcagtccgatggtaatgatgccgagcagcatttttccggcgtattctccgttccaattcgcaaaacggacgaaaagctcagctccggtcagaataataataatgtagaataagcgcagaatcatatgcgtaatttttgcgcccttcgcttttccggcaccgtacagcccgtagctgacaaacaccaggataagcgcaacgacccatgaagtaatatgccaatgtgtcattatgttcaattccccctatcagatcaatctgcctcacttatggtaccacaacaagccgcccggagcattatcaatcgtgcgaaagacacacaattatccgatttggttcgacagcgtgccgatcggttcaattgtaatgtcaatgcggtcccccggctttaaaaatttcggcggcttaaacccttttccgacaccggacggcgtccccgtcgctataatgtcaccggcttcaagcgtcatcccttttgacagcgtctcgattaattcagctatcggaaaaatcatgtcgcccgttgatcctgattggcgcagttctccgttcacccgcgtttcaactttcaggctttgcggatcactgacggccgacttatgtacaatgaccgggcccatcgggcatgtcgtatccaggcttttgccgataaaaaactgtttatgttttttctgcagatcgcgcgctgttatatcatttacaattgtatagccgaatatatgatcaagcgcatgttctttggagatgtgcgatccgctttttgatatgattaccgcaagctccccttcataatcaagctgctccgttacgtccaagtggctgttcactgtttctccgtgtcctgtaacggcagcgggggctttcgtaaaaaccatgggatgctccggtatatcagcctcactccccatttcaacggcatgatcacgataatttttcccgatgcagatcacgttctttgaaggtctcggaataggcgcgcaaagctttacgtcagacagcgcatacataaatgaacccgactcgtcattcggttttttcgcccattccgcaagctgtccggcatgcgcgacaaacttatctcctttttgaatgcactcgatcagcgaacccggaatcgtctcaagttcaaacaattttttttcagccttttgcagatctaagattttgtcatcatcaatgatcagaccgacaaatgttcggctgttcagttcccctgtcgcaaatttcatgttaatcccccatcatttttaaatctggcattcctttatgtattcttcctccaggcgggaaattcctcttttaaacaggctgaaaataagtgtaaaagagtatcaaaaattgtcacttttttagtcatattgacgaaataaaaccttcttggacaaaatgggttatactattatcatcctatgttttccaaaataatcgagaattggagatcacacgatgaacaaaattgaagaaaaaagattaactttattcgagacagcgcaaaaattcggaatcaatgcgacggagaccatcaggtgcagccaggagctggacagccttttaaacgggtgccggggcgggctcatccaacaaacgaaagacagcgggctgaacccgtccgtacagattgagcacggccgcaccgcaggaaaaaaagaggctttctcataaacgtgatgtgtatataaatctgtatcatttatgtataaggcccggcatgcgtatagcgccggtgtttttacgtctaaagttttttccgctcacaaaaatgtgcatttgtcataagctattttaggcaggcagcccagataagctcctggagtgcagtcatgaaaatcttcacgaaaaggatgtgctcgtatgcccgcaattgtcggagcgtttaaaattaatgccgtcggtacgagcggagtcgttcatataggcgactgcatcaccatttctccaaaagcagaggttaagacatttgccggagcgggcagtttcaataccggagacaatctcacactgacgaattacagaaattcaacgaatgtgtacgataatgatgtaatcgatcagccgatggcaggaaacgcataaaggaggcgccgtatgaatttttacgtcaatcagtcgatccatatcaattacatgcgtgtagaatctgtcagcaattcctccatactgcaaatcggaagcgccggttcaattaaatctctttccaatctgtacaatacagggagttatgttgagccggcgccgcctgtcaccgcggggcagcagactgtaacaacagggggaggtcccggcacctcatcatttgtaccgctccagccgccaagccggtagttttaatgaaggaaacgagacgcgaggtgaatgtcatgtatgatcaatccgtttcatcctacctgcagaatttaaattctttcgtccagcagcaggcgcagcagattcaggagctcgaacggcagctgaaagaattccaaaatgaaatttcaacgctgaagcagcagccttctacaagaatcgatcggctcgagtataaatttgatcagctgaaaattgaacggctggaaggaacgctgaatatcggattgaatccgactgatccgaatgccgtgcaaaacttcgaagtcggccagacatctccgcaggtcggaatgatgcagcaggaacaggcgggccagcaaatgcagcaaatccgtcaaaacgtcgatatgtacctgaatgaagaaatccccgcgcttttagagaagctcgaaactcagtatgagagcaggctggacgaagcgaacaaatatcatattattgaagatatcagaaagcagatggacagccggattcagtattatctgtcccatgtcccgaaagaagaaaatacggcgcccgcgcaatatgccgagcagattgccgaacatgtgaagcgtgatattgtcagggccgtcgagcactttattaagcacatacctggtgaaatgaaaggtgatgatccgtcatgatttttacagtgattaaccggaatattgaagtcggcgacatccggtctaccggtgtatccagttcttccttattattaatcggcgacaccgattccgtctatctgtcttccatctttgacacgcctccggaatctcttattatcgggccttatgtgccgctggcgccggaataatgttaaagcgcatttcacgcctccggaacgccaaaatcaattcagtcggaattgcgagtgtctttcaagcaggcgatacgaatgaaatcaatatgcgggtcaaagtattggccgatcagcgtagtcttgctgtatacagagatgatgaaggctcatttaacaaaaaagaataccagatctttcggcagccggccgtcatgccgttaccggaaacgggagtccaaagcgcattctgccatgaaaacccttcaattcgggtaaggaatgtgaaagttcaaggggtatcgtcagcgtccgtggttcaaatcggatcgacgtcgatcgttctgggagattcgcggctgaaacatattaggcagatcttcacatcaagctcacaatcacagcagccctgacatataatgacggtgagacttctataaagggtgtcgtttatgccagcaattaccggacctatagctatcaattccatatcgggcggagtcgtaaactttggtgattccttttacctttctccaaaaagctcttctaaatctgcgctcggttcgggagcaggcaataccggagatttcctgttattaaacaacgttgtcaatgcgacaaactatatagaccccgatgtcagcgatcaaaatgtggtcggaaacgcctaaaaagcagccgctctttcagaagagggctgcttttggttcagcgttatgttcgttcatttgctttttttgtttttacaagcttttttggcggctgttttctgatccatttcacaaaccgcgcgagtttcgggtcacgccgcagctcttctattcccgcgagccttgccgcaagctcctgattcgtatagagcgcgtgaacctgtttatgacaagggatgcagagcattgcgatcggaaggaatgtcccgccttcttccttaggcgttaagtggtgctccgtcagccgcacatgatggcggccgcataattcacatgtgccctcggcagaatcggccataattccttctcctttctacatgatctccaatgtgacccgggtgcctttcccgcccggttcggacggatgaacgattaattttttcggcagacgcgctctcagctcctgcacatggctgatcactccgacggataagttgtccgattgcagcttttcgagcgctgtgacaacggtgtctaagagcccttggtcaagagtcccgaatccttcatctaagaaaaagaattgcagcgggtattgcccccgcagctgaatctgggcggacaaggcaagcgcaagcgacagcgatgtcagaaacgtctccccgccggaaaggcttgatacgggccgtttgacgcctccgttcgcatcatcacgcatgacgaaaccgccttctgaatcgactaatatggcataccgctgccttgtcagcgctccgagacgggcagaggcgtcccgagccacgctttccagctgttcttccgctaaaaattcgacgaatgtattgcctttacatacagactggagcttatcaagcctgtcaatctgtgtctgccagcttttcagttcggcttcaatctctttaaagcgcttatgctgtttttgcataaccgcgaaggcttttgcctgtgctcctttttcctccatggcggcgcctgactcagcctctgcctgcttcagcagagaaacggatgctgtccattcttcctctgatatccggcggtcggctaatttatcagtaacacggctgatatttgccgatagctgttttgaggtgtccaggaactcatcaatttcttttttcatttcctctgcacgcccttgcggaagcagactttttttgacttggtccggctcggtaaacccggtgtcttttgacctcacgcgccagtcgttttgcgctttctcaagggaggtctcagcatccctgagtgacatgagactcccggattcccggccttttgcgtcattcagtgattgctgcgcctgcttcagcgcgtcgaatagggactgctctttcgattttaacagctgtaattcctgccgcaccgcttcaagctttgcggaaattgatgtttcttcagctgctgttccgagctcttgttcatatccgtcaatcacctgctgcaggcgctccgacgcatagtgaagctcgagccgttcccgttcaagccgatgcttcatctcctgcaggcgttctttctcctcttcatgttccttgaggaatgcgatgcttgtttcaatgcgcttctcacattcttctgcctgcctgtccttctcatctatcgaagcctgccaggagtcaatccggtttggcggaatatcaccgcagacttcgttgtactgattcaatcggctttctgacagcgattcaagctcttctaatgaatgtctgagacggtcggcttctttttcctcgtagcggattcgttcggcaagctgctcagcttgtttcaccgtctgctgatgcgcgctgatcagtcttgtgaccttctcttttaccgacagcatatcctgtttcatttgtttccactccaagcggacggcgctgaacgcttcatcaagcgggcgtccgctgatggaggaagcggcttccagctccggaacccgggcgctttgcagaaacggacattcttcggtaaaacgccccgactgttcttctaatgcaaccttggctgtcagcacttcctgagaaagagccgccgcctcagaaagcagtgcttcaacctgctgcagctgttcctgtacagctgtatcaggcgagaatgtttcatgagcggaacgagggcggtcatgctgcgtcgagccgcatacaggacaaggctttccttcgattagtttttccgataattcttttgttaatgcagccgttctcgcttcctctgagcgcctgcggagatcggcttgcgttttgtcagcccgttcggctgcggctttcagtgaacgctccgtttcacagaccatatggtaaacggtttgaagcgtttgataagcgcgcgtaatgtcttcctcttccgttttcgctttcgctgtgagcgactcgctttctccgttcagcttctccacgtttttcagctgcgttgtcagattggcccgttctttcgtgatttgttcctgtgtctgctgaaagcccgccgccagctgtgctgcggtctggcattttttccgttcatcggcggtcacttgaactgctttcagctcttctttcagctcattctgcctgttttggccgcgggtcaggcggtctttcactccggccagctgtttcgaggcggcttcgtattcttcctcttttttgctgtgttccgcatttgttttttccgcttcttttttcgcttcaagcagtttttgttctatggctgaaagtctttgatacagctcttcttccttgacaagcttcggctcctgttcggccttatgggcccgccatgcttcataggcttcattttgccgggtaaatgaaacggtttccgcctctgatttccgtttggccagttcgtgctcctgttcggcgcgctgcttccggcggacggcttctgtgtagcggtctgcgtacggctcaagggcgagagctgtttcagcctctttaagacgctcagtcaaatccgtgatgtacgggcgtctttcctcaagctttttctcccggcgctcatattcatctctttctgtctgcaggttccaaatttcctggtgattctcaaaacgctcttttgcccggacccgtttcttctcagctgcttcaagccgttcgttcgcttcgtgaaactgctgttcagcctgcttcagcgcatcttctcctgcgtctccgaggccggattgttcggccagcatttcattttttttcgctgccgcttcctgcgcccgccgccgcaattttttgacaagcctgtccccgtactgttccagattaaacaggcgctggagcatatgtcttctttccgcgcctttaagcgacagaaactcggcaaactttccttgcggcagcacgacggctcttgtaaagtcgtcaatggtcaggccaagaagctcctctacctttttgttcacttcattcgctttatcggccagcaccgtttgttcgtctttgatttcaatcaggcggcagagggcggtttttactttcgtttcatccgttctcttaaaaacgcgctcgaccttgtaggaaacccggtggccggattgaagcgcgaatgtaaatgagacggcgagctgatcttcggcatgattcaggattccgtgtgtattatttgcggcgcgctccacttttccgtataaagcgagtgtcatggcatcaaggatcgacgattttccgcttccggtcggcccgaaaatcccgaacaccccggctcctgacagtccggcaaaatcaatggtctgttcctccctgaagctgtggagcccttttatcgttaacagaatcggcttcatgtcgcatcctcctcatcatctgctgacgcaagctctaaaaacagcttgaccatctcctcatccggcacgccgccgcccgtttgtttttcataaaacttcttaaatcgatcctcaattgatgtgtgtttcacttcaatccggtcattttcggtctctttttcttcaaaaaccggcctgatatggataaagccgggatgcgcctttctcagccgatgaatttcctcgagagaaagctgatccgtcaaatggatatcaaggtcgatccaggcattccggtcacgcccttcatcgagccagccgtgaacctcgctcagcccctgcgctttccatttgacgagcggtttaccggaagacaggaaaacctcttcccacttcgcttctccgccgggcttcgcttctaccaccgtcaccgatttggcataaccggcttctgaaaagctgtatgcgagcggagagcctgaataacgggcagccgtcttggcgcgcttgatcgtttgcggacggtggagatggccgagagccacgtaagccgcatcagccggcaggctgtcagcggcaactgtgtaagcgcccccgacttcaatcggacgctctgaatcggtctgatttccccccgcgacataaatgtggctcgccgcaattttcacggcatcgtcccggcacagtccgcacatgtgagcaaacgcctctctgattttgacatcgtaatgatcgcgaagaagcttttcctcaaacgtatcagaaagcacttcgtttaatctcgcctctgacggatatgccagcgcggctacggctaacagctcgtccgccgacggcacctcaatatgcacgggttctgtccgcggatagccgattaaatgaatgccgcgctcatttgttaacggagaagccgccgccagcctgtcgggattgtcatggtttccggcaatgacgacgaccggtcgttttccgccgtcagaaagcgcggaaagactttcataatacaattgttcagcgagcgcaggcgggttgaccgtatcaaatacatcccccgccataatgaccgcatcaatgttttcttccttgacaatggtattcagctcttccaatacctcggcctgctcgctcagccggcttctgccttccagcgttttgccgaggtgccagtcagctgtatgtaaaatgcgcataccgcattcacctcactttttgatagaaaaaaagatccgctccaaaaaggagcttcggatcttgttacagtgtaagaacgtgacctccatcgaagaaatagagcgcacgccctttcactttcgtttttgtaatttgttcaaccgcttttgtatacaattcgatttgtgtttcataccttttttgcagaatcggagccgcgccttcaaatccgttccggaatttcccctctatccgatctgttttatagtccagcaaatagaggccgtccgccgtttcgtagaggcagtcaataatcccctgcacgagcagcggttcaccggccgtttcggcatccttgtacacctcgccggccggaagcgccatactgaacggcacttcccggtcaatccgcagcgccccgagaaggtctttcccgatttcagttccgaaaaactggacaatttcttctatatcaatagcttcctgctgttcttctgtcagcagctctttttcgtaaagcatccggaccgtccgctccgcttcttcggcagtcggaacgtgcgtcagcggtatgtgctgcatcaccgtatgcatcgccgtccctttttcggcggctgtcagcccttttttcatcataaaaccgggacgcctgtataaaagcgtgtctcctgacggtttgatgagagagcggccgctgtattcatcctcgtattcttgctttctcttcagctcagaaactgactgcttcgttctgatagccgtcagctctcggtacggatattcccattcaagcagacggcgcgcctgatcatcaaatgaaaacgaatcaggaatcggctcgccctgctgaatcgctttgagacgtttgctcttttcttcagcacgttctttcggattctcttccagcaattcactttgctgcagcatccggatgtgaaaacgcgacgggtcgcgcgcgatatcctcagatgaggaaagtcccggcgtcctgtgcgcctccatgtcacggtggcggatgagcgccggcccgataaagtccaaataagatgacgcctgatagcggtcgaattcagaaagaagccaatcgggccggtctgcttgcgcctgccatttggccagctgtttttcccggtttttgcaggaaccgacgagaaacagcttttccttcgctctggtcagcgccacatacaatacgcgcaattcttcggataagagctctctgcgcatctttttcttcatcgccacaagcggaagagtcggatagctgattctgagttccggatgaatatacttcgtgccgaaaccgagctctttatcaagcaggtatgatttgttgagatccatcatattaaaacttctgccgagtccggcggtgaaaacgacggggaattcaagtcctttgctgctgtggatcgtcatcagccgaacgacatcctcctgctcgctgagcgcccgggccgtccccaaatcatcgccgcgctcctgcatccgttcaatgaaccgcaaaaagcggaataacccgcggaacgccgtcgcttcgtacgagcgcgcccggtcatacaagacgcgcagattggcctggcgctgctttccgccaggcatgccgcctgcatagtcaaaatatccggtatcgcggtatacttcccaaatcagctcagacaccgaatgattcgtcgaaaatgaccgccacttttgcagactgtcataaaaggttctcagtttttgatacagttcatcatgtctgtcagcgttcgctatatatgctttcagcgcttcataaaacggcgcttttttcttttcaagacgtatcagcgcaagttcattttcgtcacagccgacgatgggcgagcgcagcacggaagcaagcggaatatcctgatacggattatcaatcaccttcaagactgaaagcgccgcagccacctccacggcttcaaagtaacccgacgtcaaattggcgtacaccggaatgccctggtttttcagctcttccattaattgcggcgcccacggcatggagcgcagcaaaattacgatatcccggtactggatattccggtgtgtttttgttttgccgtcatataccttaaacggagatgagacaagctttcggatctccccggctatcgctttcgcttcccaatgcacggtttcaaagtcttcggcatcctcggagctgtctgcgccatcagcgctgtcaatgagcagcagttccgtttttgccgcgtcattcggcggatacgatgcgccgatcttcaatgccgcctgttcatcgtaatccacttcgccgatttttccgcccatcagctgcttaaacaagaaattcgtactgtccaaaatatcggagcggctgcggaaattttggttcaggtcaattttctgccccgtgcctgccccgttttctgtaaaccttttatatttcccgagaaacagcagcggctcagcaagtctgaaacggtagatcgattgtttgacgtcgcctaccataaacagatttcccgcctcttcattcccgcttttaacaagctgcaggatagactcttgcacaagattcgtatcttgatattcatcaaccagaacttcatggaactggtcttgataataaacggccgcttcgctcggcacccgccggccttcttcatcaaccgcagttaaaatcgccaggcagtaatgttccaaatctgagaaatcaataattgatttttcttgtttcgccgcttcaaatcgttttccgtatgatatcacgagctgaacgagcgtttcgatgacaggcttcatatcttttaaactctttaagtgatcttgcggacttcttgtaaagtaatcggtctttaccttttcgatcagtttcttcgcgccgtttcgcaaatcggtcgcttcgtccaaaagcgctttgtcaaattcatcgccctttaccgccttcgcccgcttaaaggagactgcgggaacccgttcatacagcgcatcgaagtcatgccggcagctgatcagctcttctatctgctgaaggtcatccagaaaattatcagcgcgcggggccggcccgccgggcgcttttgtcagttcaagcgccttctcaagcttttgttttgccccgaagagcgccatttcagcatcttctttcacatactggtaaaacggaagctcttccattttgctttcttccgtcacgtcatacaggcggacaaagctttgcagccacgcttccgggtcaggatgcgaccgggaatactcgtacacccgtttgacaaggtcttgaagatcaagatcatgcctgtctgtcgtatatctgtccgcaagctcaaaaaacgcctgattcccttttgcgtattcatcttcaaacagctcatcaagcacttcgtctccgagcaattcgccttccgtctggtcagccatccgaaaaccggggtcaagatcaatcatataataatattttttaagcacttgcagacagaaagagtgaagcgtcgaaatgctcgcccgatttaatagagagagctgccgtctgatatgcagagatcccggatttttggcgagctctttttctaatgcttccgcgatccgatgcttcatctccgctgctgaggcgtttgtaaaggtcaccacaaggagccggtcaacatcaaccggatcttcctccgcggttatctttctgatcatccgttccacgagcacggccgttttacctgatccggctgcggcagcgaccaaaatatcgcggccggaagaaacgatggcgctccattggtcatccgtccatatgctgtctttcggtttaggaatttgcatcatcatccgcctccttcttcagccaatccagtatggtgccgtctttttccgctttcaggctgcggtattcattttccttaagtgactcatcaaactggcataccgacttaaacgcacagtacgtacaaggcgtcttatctttcagcttatacggggtaatggacacaagcccgtccgttatcgcttcgccagcctgttcaaatgtccgccgcacatggtctgtcagcagatgaaagtcctgttcgctgaccgcggctgagtcggatcttaaagacccgtcctttttcaaaccggcattgatgatatttgaacgcccttcctccaaagtcgtgtccatcagactgatcgcctcccggtcaccgaggagaaggcctttcattttaaatttcttgaaaatttcctgctcgatttcatcaagccccatcggcagactggcctgaatcatcggatcgtgaatatggaaatacaaaacgcctgccggtgtcgctttcatgccgagccaatccgcggaatgtgtaatcgataagtcaagatatgtgagcatttgcagagcgagcccgtaatacacctcagccagatcaagccccctgtcgcttgatttataatcaacgattctcagcagcaggccttttgaactttccgctttatccacgcggtcgatccgtccgacgagttccatcgtacagccgtttttcagcgtgaaagtgagcggaggcagcggcccgcttccgccgaaaccgagttcaagaccgaccgggacgaaaccgctcgccttcgcatgctcgcttaatatgcctgaaacacgcgtgacgatcttctgcagtttttccttcacataaaagtgtctgtttgagctgagcagaatctctttttgcagctttggcgcaagccgttccaccgcttcataggagaaattccggcattgatctttcgtcagatcgcgccattccagcttctgctcacgaagccggtctgaaatcagcttcaggctggagtgaaacagctggccgatatccggcgcgtccagcttgaaaaactgccgctcttttaattgaagcccgtgagatgcaaaatgagaaaactggcaggcattaaacgcctccatccgggagacgcttcctttaatatgctcgccgtaaagctggcgcgaaacaggccgttcaagacgcttcgcctcattgcggaaaaacaagcttgaaaacagctttttcgcacgccggtgatcagactctttcatcagcacattgtatgcgctccaccatacgtcactgatctcgtactctcttgtccacagcctgagctgacttgccgtatatgtctgagccacctgtttattgacgagatactgaagctgctcttcttcgcttacctgctcgggatcagccgctgacagcttttcctgatgatcgggaaacagctcgccaagccggtttacaacgattgacggcaggagcgtttttccttccgcatcagcaatcgggtatgacacataaagacggtcagacggactcgacagcgccatatagatgagaaaatgctcatcaagcagccgctcacgccccgcggaagacagctccactccgactgctttcagccactcccggtcatcatcagacagcacgccgttttcatccgggcgcgccggaagaacgccgtcattgaccccgatgacgaatgtgcaggacgtgccgtacattcttgagaggtccatattccctacaaatacttggtcaagcgcaggcggaattaaagaaaaatgaagcgattccgttcccgtttcaagcatttgctggaacagtgccaaagatatttcatcttcacccatcatgccggcaaactcctcgagaagctggataacggcatcccacgcctggccgtgctgctgcgcatcgatcatgtttccggtctcttcggcccgctgccttttccggtccagcttcaggggaacatcggtatcttccaaaaagagataaagagcctccgccatgctttgaaccgttttcgcttttttcatccggttttgaagccggacaaggggcgcggctatccactctctcgtctcgttcagcatgtgttccatctctatttcctgatccgtctgcgcgaaatcctcatcgagcgatacgaagcgcctgtatacaaaccgctcgccgctcgtccagcgctcccctttaatgccgtaggcgatacagtaattttcaagctgatcgacctgctctcttattttctgctccggctgatcaagcgggaataacagttcggttttcgcacagcggaacaccgcttcatatctccagttccccttcacgacatccaggcttgaacggatgaattcaataagcgggtgatgctgcatagaagcttttccgtcaataaaataaggaagcccgtaatcggcaaacacttccttcagcaaatctttataatcttccggctgacggatgagaatcgccatatctttgtaccggtatcctccgtcccggacaagtgattgaatttcccgggcaataccttcaagctcagctcttctgttttgcgcctgcatgacggtaaaagcttcctgtccgccggtatacgccgcggcgggacgcacatcgtactgcgactctatacaggcaagctccggcgcatgctgatgccgcttcgtgccatgcagttccttgcaggaaatatcggcattcaattcctttgccgtctgataaagcttatagtatgtgcttcccgtcattctgaacagatcgagctcatccggtgcctgttccgccgaagggctgtccgccgtcagcgagaatgtgacatgttcagcatgcatgatcagctgctccagcacccttaattcctgcggcgtaaattgatagaatccgtcgacgtaaacacgggcgccttttacaacgtccgccaaaggaatctgctgagcgagcagcgtcaaataatcctctgaatgcaaatagtgtccggcgaggcttctttccatctgctgatataaaatgcctaaatcatgaagtttttcagacagcatccgctctccgcgatattctgacgccgttccgctttccgccatgcggcggacgtcttcaggctcaatacagtaccgcttaaactctgtcagcatccgttccacctgctcagtgaacccggttttgtcactcgctttttgatacactttaaactcgtgcttatgttcttcaatcaatttccttaaaagcatctgcacacccgtcgtcgtcacaaacgggcggttcatgcccccggtatgctgaagcacgcgccacgccaaacgcgaaaaactgaacacttgagcgcgtatcatgccgccgatatccggcgttttagcaagctcatattccattaaaaacgtcatttgatccgggactagaaaaatgatcggtttcccgaacggctcccggcgcagttcatcttgaatgctgtcgataatcagcctcgttttcccactccccgatctgcctactaaaaactcaacacccaattagaagacccctctctttttatctttctacattttatcgaaagttgacgaaaatgaccaatctcatctgctggtaaaaacgggatgactgttttaaaacatatcgtttttgaccaaaataaagaaaaaaggactaatgatgatgtcagaatatcccgaagtaattgtacggacggctctgtcgttcagcattctgtttatcggcgcccggatactcggtaaacaaaccatttcacagatgacgctttttgatttcattgcggccatctcgctcggcgccatcacggcaaatctgtcgtttaatacaaagctgccgattcattatcatgtcattgcctacattattttcgtggcaatcatttaccttgtcgcatatctttctatgaaaaacagggcccttaggggtttctttgcaggcaaaaccgaccattatcattcaaaacggtaaaatacttgagcataatatgaaaacgatgcgttataccatcgactacttgaaccagcagctgcgtgtaaatgacgtatttgacatttctcaggttcagactgccatcattgaaacaaacggcagcatgtcagtggaggtcaaaccggaatttgcgcccgttacaagaaaggatctcggcatctttgccggacatgaaaagaactttgccgttgagctgattatggacggccggctggtgatgaataatctggaagaaaaccacgtatcggaaaaatggctgagagaagaattggacaagagaaacctcaaaccggaagacgtcgtatacgctgtgcgcggaagcaacggccggctttttgtcgacacttacgacgaccatattacatcgccgctggatcaagaataaaaatgacatccgcacatgtcacgggctgccgccgtataataccctataaacattcgggggtgagtccaatgcacgagaatttttttcattatacagccatctgcagtgacgattctgtgcttataaaggatctggtaaaatccataaacggtgaatacagcgctgtgatttgctactcaatattagccgaaaaagcgccgaccgcagaaatcagaagacgaatcgaacatatcagagaggaagaagtgcgccacctgcacgctttctcttcattgtatacgtcaattaccggaaaacagttgacgccgaaacagacggagcattgtccgcacacatacagagaaggactgagggcggcgttttatgatgagcagaaaacgaatgatttttatttgcaggcatccgatagagcggtgcatccggaagcgaagcggttatttgcccgcacggcatttgacgagcagcgtcatgccgtctggtttttatacgatatggcccactctcctttccaccatacagggggaacggtatcaaacgcgccgaacacaagctacaccgaggtaaataacggcaaataacggttcaggcagatcacgctcccccgccgggagtcttcagaccgctgacaaaccccgttctttcaacatgagagaatggggtttacttttcgagcagttttatactccctctaaacaatggataccttcttcattgtataatcagcaaaaaccctttataataaaataaaccaactggtcggtttttaaggggccgaacctcatttggcggaaaggatctgtgtgaagtgacaaatacaaaaggcggtgccggaaagagcgaaaagacgaagaacaggctcgtatccgcttcgcgtgacttatttgcaaaaaaaggatattcagaaacatcgattcgggatattttagaggcggccgaaatcagtaaaggcaatctatatcaccattttaaaggaaaagagtttctgtttcttcatatcatggaagaggatcaccgcgtgatgatcgagacgtggagggaaatggaagctgatctgaaagatgctgccgaaaagctggcgggctttgcggagctgctcagccggatgagcatcaattacccgcttatgagagcaagtgaagagttttatgcgagtgcgtttacgtcagaggaggtcgtaaaacggctcaacaaaattgatattgaatatgacgatgtgatgagagagatcttagaagagggaaatcaagacggcagctggtccattcatcatgtcgaatcaaaagtgaaaatcctgctatccgtcttctacggtttagatgtgttatataaaaacgataccattcagcaaagaatcgaattgcaaaaagaagccatctccgtgtttattcacgggtcgatcagcgctgataaacagaatgacagctgacaaaggagaaacaacatgcaaaaaccgatcagagaacaaaaggctgtactcatcatcttattaagcaatatatttattgcgtttttaggcatcggattgatcattcccgttatgccgctgtttatgaatgtgatgcacttgacgggcagcacaatgggataccttgtcgctgccttcgccgttgcgcaattaattgcatcccccattgcggggagatgggttgaccgcttcggcagaaaaatcatgattctcgccggactgtttttgttcgcattatccgaactgaccttcggattgggcacacatgtctccattttatatttcgcaagggtgctggggggcatcagtgccgcttttatcatgcccgctgttacagcgtatgtcgcagatattacgacggtgcaggaaagatcgaaggcgatgggctatgtatctgccgccatcagcacagggtttatcatcgggcccggcataggaggatttattgccgatcacggcgttcgtatgccgtttttctttgcggcgggaattgcatttatcgcagtgatttcctctgtctttatgctgaaagagccgttaactaaagaagaacgcgcaaagcagatggaaagcgtcaaagaatcaactttcttaaaagatttgaaaaagtcgattcatccaaactacttgattgcctttatcatcgtttttgttttggcattcggactgtcggcgtacgaaacggtattcagcttatttacaaaccataaattcggcttcacgccaaaggatatcgccattattattacgttcagctccatcgtggcggtcctcattcaagtactcgcgttcggcagacttgtcaacttcctcggggagaaaaaagtcattcagctttgtctgatcatcggcgctgtgctggctttcgtttctacggtgatgtcaggatttttgcccgtgctcgctgtcacctgcatcattttccttgcgtttgatttactgcgcccggcactgactacttatttatcgaaaatcgcaggaaatcagcaggggtttgttgccggtatgaactcaacatacacgagtttgggcaccattttcggcccggctctgggcggtattttatttgatatgaatattcacttcccgtttctgttcgcaggtgtggttttatttctcggtctgggattgacctttgtgtggaaaggaaaagcgggcgaggtttcggagtagggtgcactcacccatctccggagctttttttgcgtttgcgataagaaaaatgaatggattatgagaaataattcattatttatttatctcaaaatctatactatagtaatagtaaggttaacgagcttaacaatttaatatgaatgtttcaggaagaagggttttcattgaagaaagacaaacatctccttacggatatctggtttattctcatcagtgcggcaggggggtttcttctttcgcttacagggatgtcgatcgcctggatgctcggaacgctggccgccggctgcatcctctccatgacgaggccccgctggctgttcatggcgcctgacagaagagggattcaccgcagatggcttgccgcgggacaaatgatcctcggcatcgaactcggccagaaactgaacctgtccgttctgtcggttttacgggagcattggcttccggtaggcttcatgctgattttttctatcgtgatggcgcttgtttccggatatgtgctctttcggttcagccggacggacatgatgacaagctttgtaggcacggcgccgggcggtttatctgccatgccgggtatcgcccaggaagtcggcgcaaacaccgcgattgtaagccttattcagctgacgcgcgtccttttggtcgtcatgacaataccgtttctcgtcattttcttatttaccaaacaaaacggtgcagctcagacatcagccggagccgtttcagcaggagcttcacatccgggccttactcccgtcttgttaacggccggatttattttggctgcctggcttgcaagcaaaggcgcaaaacggctgaaatttcccgccccttggctgctcggcagcatgatcggcgttgctgctgcggaaatcggcgtgtccgccttagcgggcaaagacatgctggcctggtggccgccggaagcgaaccagctgtcacaaatttttctcggcgccacaatcggatcaaaaatgtacaaaagcatgttcaccggcgtgacgagagtgctgaccgtcggatttatttcttccgtcggattaatcgccgccatgattctgagcgcgattgcggtttctaaattaacgggcatctccatgattacatctgttctcgccttttctcccggcgggatcgccgagatggcggcgacttcgatcaccctgcacgaagactcgactttcgtcgtcgcggttcaggtcatccggatcgttctcgtcatcgccatgcttccgcccttctatcggctgctgcaccacctttctcagctgaaacgggcacacggtgaaagaggccgggcagaaagaggaacatgatccgaataaaaaaacacgcatccatatgcgtgttttttatttgaacagctctccgccgccatttacagaccgccagtttgctgaaagatcacggaacagccgttcagcaaataacagttcttcatctgtatagcggtctaaaaacgccaagagccgcttttttatcaattcatgatattcatgatgaagagaatgcagctctttcccggcaggagtcagccggaaatagacttcttttttattgtcgctcagccgggtcctgcgcagaaagccggcttccaaaaacttcgcgcagcttctcgacacggtcggctttgtcgtcttcattttttccgctattgacgtgacattgatcggttcatgatctccgatacacgacaaaatgtgaatttccgtcaaagtcaactgtaatttttttccgtttccttcacggagttcgtccatccgtccggccaacgacgccctgatgtcctcctgacacctctcctgctcgtgaaaaatatctgtcagcccttcaagaatcatgtgttttgcatggtctggctgtcttctgtccaactgctgaatcacccttccgtattgattgtttcttttactataacgttttgttacacaagaaacaatcacacaggcgcataaaagggtatcagatgaatccccatctctccaaaccggccagaacagcttcttccgcttcacgtcccgagccgccggctgcccatgccgcgtggccgtccggccggatgaaaacggtgtggacgtcatcccaatcggcacgtgtttcagcaagctccgccctgacagctgccacgctgtccgtatcaataccggcgggaaggctccctcttaatgacaaaagcacaaaggcgcccttatgaagaaaatcatacagccgggccggccgcccgtcatgaagggtcaattcgatatccggcaggcgttttccgttcaggatatgcggcggcagctccgcatccggttcataatgcagatcaagcgcggatacttttcccgccaataaacggttggactcctgaaaatccagcaaagcggccatcgtttctcttaatgccatccccgactcggtaaaatccatgagctttatctgggttcttatattgtgcaacacttcttttcctgtgctgtgcctttcctgatgatagctgtccagaagataaggcgccgctttccccttcatttgcgccgccagcttccagccgaggttgaaggcatcctgaagccccgtgttcagcccttggccgcctgcgggaaaatgaatgtgcgccgcatccccggccacaaaaacccggccggagcggtactgctcagcctgacgctcggcattgccgaaccgcgacatccataccggatcactcaatccgaaatcagtgccgcatatccgccgcaggtcttctttcagctcattttcagtgaccggctcttccttccgcttttgcggagcgtgcggagaaacgatgaggatgcggaaaagtccgtccgtaagagggacaatcacaaccgatccctccaggcggcacgttgacaaaaaggaagattcgggcggatgtttcaaagcggcatcacagagggttcctgttaagtcggcatcagtgcccgaaaaagcgatgcccgcctgtttcctgacaatgctccccgctccgtctgtacccgcggcatataaactgtgaagagtgcggatcccgctttcgtcccggaacaccgtctccactccgtcatccgtctgggtgacagccaccgcttccgccccgcggatgatgtctgcgccgagacttgatgcatactcctccaaaatccgctccgtttctgcctgaggcagcattaacgaataattctgcttcgtatccagccgagaaaaatccagccgtgtatccagcatggaaaaatggccggaagacaccttcgtccctttttccaaaaagcgttccaatatgcctctcatggcaaaaagctcaagtgtgcgcggatgcatgataagcgctttggaatatggcaccgtcttcttcaatcgttcaataacagtcgttttcactccggccagcgccagttctgatgcaagcataagcccgaccggacctcccccgataatggcagcctgtgttttcatctcatcagccctctttcatattttttgttacacacgtaacaaaataaccaaaaaataaaacgccttctttttgtttcacacgtaacaattttcattatagtctttcctctgcttttttacaatcatttccgaaaaaaaagacgccgtttacctggcgtctgattcactgatgactccgacaatgtctttatccttaatcggaccgaaatgacggctgtcgaggctgtatatgcggttgtcgccaataacaaagtattgtcccttcggtatgcttttgcgcccggtcgtttccttcagcgtataatcaccggtcacatggctcccggcggacaatgatgactttaacggttttaaaaacggttccgccacccgttttccattcacatacagctgatcctccctgtatgcgattgactcgccggggagcccgatgacacgtttgatcagcactttgcggtgcgggcctttgaacaggacaatatcgaaacggcggatcgttttgtaacgatgggaaaacttgttgaccatcagctcatttccttgtttaaaggtcggattcatgctgattccttcgactttataatcaataaaaatggcattctttaattgtatggccaaaacaacgataagcacgccggctataaaccaaaatcgttttttcaagattcctgtctccctccgtctttctcatgctgactgattctcatctgtaaacgccgttcgatatgcttcccggcataccacagcaccgcgatcaccattatggcgcccgccatcctgaaaggctgtgtcatgagtgcgtgaagatcatatccgataaagctgatcataaaaatcatgaccattttccccatagcggctgctgatataaactgcagcgccccgacccgtgacaggccggcaacgatatgaaccgcagcggacggcgtaaaggggaagcaaagcaaaataaacagcggaccgaaaccgtgccgctcaacccagagcatcatccgccttatggtctgatgcctgcggatgaaaccgaaagctcttttctgtccgaaacggcggacggcataaaacatcagcatcgatcctgccgcagatccgagccacgacagaaaaaaaccttcccataacccaaatgcattcgtattcgccaccacaaatacaacaaggggcaaaaacggaagaaacgcttcaataaaaggcagtgcaaccgcagccgccgggccgaaagctctatagctttggaaccattccgtcagctgttcctcagtcaaatatgataaaaattgctccaacgtttatactccttaacgagtttgtctatccttattctacacattatctccaaaaaacgaaaatgtttacgagattttccgacttgaaatatcgtgtaagcgagtataaaataagaacaaacgttctcttttttaagaaagaaggagtatttatgcctgacatccggagcggcacccgcgatctcatcgaaaaagggctgtttctgcccatggcggctgccatcctgaaccgggacctcgaagcgcttgattcgtgcccgttcaaattaaaacaaccctataaacagcttatcagctgctctttaaaattagcacaaaaggatttgagtgatgttcgaaaagagttaagaaagcgtaaaattaaaatatacgaagcggaaagagacgaagcatttacgctttatatatgcaccattaacggctatgaagaaaaacaccgttatttcaacccgagaatacgggaacaggtaaccgccttattagaatattacctgtctcttgcgaccatttaaaaagcagccgggactgcttttccttttcaactgataaatttcagactattcacactatacattcgacatgattttctttataatcgggacacgctgttttcaatgaaaaggaggaatgttatgaaactgattcatgttctcgccgccctgccctttttcggaattctcgccggcattccatttgccaaccgggtgacgccttatgttttcggaatgcctttcattctcgcgtatgtcgtcatctgggcggtgctgacttccgttctgatggccgccgtttacaaattggacaaagaaaacaaggcgggtgaggcggaatgaacgcagcatttcccgtaatggccgccgtgctcctgttttgtgtgtatctcggaatccgggcccgaaaaggaaaacatatggaccttgaacaatggacagtgggcggacgcggcttcggcacgatgtttgtctttttattaatggcgggagaaatatacacgacctttacattcctcggcggaagcggatgggcttacggaaaaggaggccccgccttttatattatcgcgtacggctgccttgcctacattttgtcatattggcttctgccagccgtgtggaattacgccaaacaacacaaactgatgtcgcaatcagatttttttatttcaaaatacaacagcccgctcctcggcattctcgtatcgctcgtcggcatcgcatccctcatcccctatctcgtcctgcagctgaaagggctcggattaattgtttcagcaacgtcatacggacagattccgccctcagccgctgtctggatcggcgctgtctccatcacgatttatgtgatgatatcaggaatccacggttcagcgtggatatcagtcgttaaagatatcatgattttaggcatcgtcctgtatttaggcatttatctgcccattcattactatggcggatttacggagatgttcaaacaaattgacgccgcaaaacccggttttctcacgctgccggaaaccggacagagcgtttcctggttcagctcaacggttttgctgaccgccctcggcttttatatgtggccccatacatttgccgcttcctattcggcggagcatccgcgggtgtttcggaaaaacgcgatcatcatgcctctttatcagctcgtcctgctgtttgtcatctttaccggatttgcggcgattctgcaggtgcccggtttaaaaggggcggacacggatctcgccttattaaagctgtctgtgaaaacctttgatccctggtttgtcggactgatcggatcggcgggcattctgacggcgcttgtacccggttcaatgatattaatggcctcaagcacgctgttcgccaaaaatgtgtacaaagccattctgcccggcacgactgacgaaaaagtctcacggctcgcgaaatacaccgtacccgtcatcgcgctgatatccgtatattttacgctgaaaggcggaaataccatcgtcaccttgcttttaatgggctacagccttgtcacccagcttttccccgccctcttattcagcctgccgaagcggcgttttatcacaagccacggcgcttttgccggcataacggccggggtcggaacggtggccttcattacgctgaccgaatcaaccatcggaaccctctttccgtttcttccgcagatcgttaaagatatgaatacaggcatcatcgcactggttctgaacattgtcgtcatgtttgcagtcagcgccgcagtcagaaaaaaacaaatcagcgcagccgaaaaggcggcttaaatggtaagatagcggtaagatacacgaaaggggaaaaacgcatgatcatgacaacgaccgaaactgtcgccggaaaacagattacggaagtgaaaggcttggtgacaagcagtatcgtccagtcccgtcacatcggcaaagacttgcttgcaggcttaaaatctgtcgtcggcggtgaattaaaaagctatactgaaatgctggaagactccaaaaaagcggtgaaagagcggctgatcagagaggcggagcagctcggagcgaacgccatcgtcggcctgcggttcgaactgaccgcaggacagaacacatccgaattaatcggatacggaaccgccgtcaccgccgaatccatttaaaaaaacaagcctctttaaagaggcttgtttttttatttctcacatgcgatatagtctttatctcggtcaagtcttttatttgcattgtaaagcgcttttgatacatacggcttgtactttgttctaccgcccttgtttttcactttcgacgatttggccacgccacccttatacaccttgttcagcgccttgcagttttgatacgtttttacctttgttttcgcttctgccgtctgccccgctccgtatgaacaaccgaacaccagaccgaaagacaaaagcacagctgccgtctttttcatttctatcctatcccctctcctaagttatgcggtattgctgaacatatcataattcaaataatctccatttacaagagaaataggaagatagttttaatttacgtccgctcgtatatcttttatggaatttttcccaaaaccttttataatatgaattgatagcgctatctgactatgatgataggaggagaaatgatgatgaaaaaagggcttgttgcgggtgtgctcactacagccgttctattcggcacatgtacggcggaaattccgggggtgatcagccccaatacggcggaagcggcgtcccagctcagcaaaggaatcggcggaagggcctacctgaatagcacgggttctgtactcgtcacgaaaattcagcttccaagctcaattcaggtgtcaaatgggacagcctatatttactcaggatttaccggaggcacagaggctgatatcggacttcagtacagtgacacctatcatgtatggaaaccgatcatgaaagtcggttcaaagggacaaggccaggtccggtatctggaaggagaaagccaattcacctatacgaaaggcttccggcccggcagcaccgtacagctgaccatctacaaaaatctgaacggcaatacccgcgccacatactggggcacgaataatgacggatacaccggccgcatcatctcagaactcgcccaaacaaatgtaggctctgtctcaaaatggaaagcgctcgccaccgtcgcggtcacatcagaggatcagcgcccttacatcaaatcaaacttctcaacagcctttacgaacatcacgattgacaataaagcagtcacacctgtgattgatacacaggattttgccaaattgacagtgtcaggcagcagcgtcagcatgtctgtcgtcaaataaagaattccgaacgcacgatttctgacatcgtgcgtttcgtgagggtctgccggatacgcaaatcccttatttttcggattacgtttaataaacaaactctgttacattcaaaatgtcgatttctatataacaattagaggaacctcatttgttgaggttccccgttattctccaactcacgcaccggttaacttcacatactgtcagccggctcagggctgtccaattttagttagaatatagctttaacaggtcttgtgctggaaaacgatctgcatcgttcgcctcaacaaaatatgccaactgccatttttgtgtttcgatagcttgtttgctagtgggattttcccattcagggtaaactctaattgccatttttccttttgtagcggctgttttaaggatattttgctttacaagaacttcttttggaaaaacaaattgtccaaaatgatgattactggcaaaagtattgataaccaataaatcagcagctttttcatatgaaaaggcttggtttttaccatctccatctttttcccaaaaagcaacaaactgtcctatcttgttaggcgttatttttgcgactctgaatcgaactgattttgaatgcagttgaaacctaccggccccatactctgagttttgagcttcttcttgaatatcatgtatcgttaagtgatttggttcataaaaaattttatttacatgtgttaacgccttataaaattcattcactgcttcgtactccttattttttatagtacgtcatccattgcttcttgattaaaatgggctgatcatgtgtttccaataaaaaaacagccctcctcagggttgtttttttaacatttctttcattatttccgccaaaatgctgagcagtccgccttatcctgaatattgaattgaatcatgcgttcaagcagctcataatgcaccggttcagtccattgaattctgaacaaacgggaagtggcgctgtagccggcacaggcaatgtcgtcggcaaaatgcgcaattcccgcttcttcgggggaaacacttacatgatgctttgctgccgcaaagccgataataaaggtgccgtgatcggtaaacattggcgtgttccacttgatctgcgcttctaagttcggaaattggtcagccgtccacgagaggatttcctccattcgcagacgatgatcagggctgtcgatacttgataaacagtctttgaaaacgtccatgtctgcctccttcaacatcacgtccgctagcgccaaaaccccggattttcagctttttccttgatgttaaattcgatgatcttcttaagcagatcatagtgcaccggatcagtccatcgaattcggaacaggcgcgaagaagcgctgtacccggcttgagcgatgtcatcggcaaaatgctccatcgtctctttttcaggtaaaatgctcaaatgattttttgccgcggcaaacataatgatataggtgccgtgatcggtaaatgtcggtttgttccacttgatctgcgcttctaagttcggaaattggccagccgtccacgacaaaatttcctctgctttgagacggtgatccgggttatcgattcctgatacatattttgcaaacacatccatgcccatctctcctaaaatgaaatatcattactctttacatcatcatagccaacagacggacacgatacaactctggtcaggcatgtaaatcgaaaaaagccctccccaaaggagaggacccgtcccttcacatcacagctttctctaatatctctcccccagctcccgcaaaataaagtcgtagatcattcttgtccgctcttctttcggatacagcatgaattcctgccgcttcgggatatgactgcccatcctgtcctgaaaagtggttctgagataggcggttctgtaaacctgattttcaaaagaatgataggatacttccagctccatcgttttgccgtttgagaacgtgaccgctgtgtcatcaaatgccgtcggttgaaaatctttaacgtgcacatgagatatccagccgcattgaggccttgcagaagaaagtgtagggaataaaaagatgtgatttgaagggtccaccataatcggcggcttgtgagaaattttaatcgcttcatatgttcccgcttttctcccggcatagctggagccaaagtagcggcagcttctgtcgatgatgtgaatcggcttcatgctgacatacagaatgcagtctttttcaatgaccttcgaccccattttaccgtctatttcctcaggcaaaacagcgatggttgaacgatttacttcgtagctttctaagggtgcgtgtattttctggcacataatgtgcagcctccaatccttttcttgaaaatttatactaataatctatcatctgtcattggaaaacgacaggttttttttgaatatagctaaaaatcaccttttaaagatgtaatttagtcttaaattactatttaaatattgtttttctttttcgtttcacctcatttatacgatgatcattttcgttttttcgtcaatttgcaggatatgtcgatatatttccaagtattagttgtctaaagattataaaaattaattgatttttccggccgttatccatatactataaaaaaggcattggggggattctttatgaaagagaaaaagtcgtacactgagctcatgaagtcccgcaacacgcaaatagcaaacgaattcgatgtgacaatggccgatatttacattcaaatggtgcttgatgaatccttgtataaacgccggctcgccatgctgaccatgcagattaataaggcgcttgatgataaaaataaagaagcgttcctcacgctttcaaaagaatatgcagcactcaaacagagtgaataagccaatccatatggattggctttttttacattatccgtttacgatggtgccgccgttcacatgaatcgtctgtcccgtgacataggaagaatcatcgcttgctaagtacaaatagctcggcgccacttcaacaggctctcccgggcgctgcatcggcacgtctgagccgaagacttccacttccttcgccgagaagctcgccgggatcagcggcgtccagatcggccccggcgccactgcgtttaccctgatgccctgagtgacaagagattgggaaagagatcttgtaaacgtgacgatcgccccttttgtcgctgaatagtcaatcaatgttttgtggcctttataggcggtaatggaggccgtattaatgattgaacttccttttttcaggtgggggagcgcggctttcgttaagtaaaacattgaaaaaatattcgtctgaaacgttctgatgagctggtggctcgtgattttctcaatccccggctgcacgtgctgctcacctgcgttgttgaccaggatgtcaatggaaggaaaggcttggcccgcctggcggatgacatcgttgcaaaaggcttcgtcgccgacatcccctgcgatcagcagacacttcgccccctctttttctacgtattgcttcgtctcttcggcatcctgatgctcatcaaagtaaacgatgaccacattagcgccttccttcgcgaataaaacggatacggcgcggccgatcccgctgtctccgcccgtgatgatcgccgttttcccttcaagttttttcgccgctttcggtttgtcaaaaacgggacgcgggtccattacatattcaaagcccggctgccggttttgatgctgcggcggcaaggttttcttcttctggttagccattttgatcactcctttacattaattactatattatgagtaatttgagcatcttatacgaatttcatgtatgaacagagtcttattggaaaaattaagaatatacaacagaggaggtaaatctgaattgactactttttcaaacgaagaaccggcttcctattggaaagcaacagctgacattccttcctttcccgccctcactgaagatacggaatgtgacgttgcggttatcggcggaggaattacgggcctgacaacggcatacgaactgacgaaaagaggtttccgtgtcgctgtcattgaagcagaccggattttaaacggaacgaccgcgggcacgaccgcaaaaatcaccgcccagcatgatttcatctatgccgatcttattcagcagatcggcctgaccagcgcaaggctgtatttcgaagcccatctccgcgccatggaagacatgaagcagatcatcaaggacctttcgattgactgcagactgattgaacaagacgcatatctttacaccaatacagaatcaggcgtcaaaaaaatccgcagtgagcaggaagcttataccaagctcggtattgaacacgagcttgtgaaagaacttcccgtccccgttgattgcaggctcggtctcgccatgaagaatcaggcgcaattccatccgcttttatatggtgcggcgctcgttaaagagatcgttaaaaacggggcgcggatttttgaacagacggctgcgatcgacataaaaaaagaaccgcagccggaagtggtcacgaaaaacagacacggcatcaagtgcagctacattgtctgctcttcccactttcctttttatgacgggggcgggctttacgccgccagaatgtatgccagcagatcctacgtactcgcggtaaaaccgaaacaagcgtatccggacgggatgtatctcagcatagacaagccgtccagatcactgcgatacaccgatttgaacggtgaaaaactggtgcttgtcggcggcgaaagccacaaaacaggccagggaaaagaaatgtccgagcattacgaagcgctgaaacaatttgcggaagacacaatcggagttgaaagcatcccatatcattggtctgcacaagaccttgtcaccattgacaaaattccgttcatcggtcccatctcgggcgatgaagaacatattttggcggcgacaggctttaaaaaatggggcatgacaagctcagcgctcgccgcgaagctttttgctgatcatattcaaaacaaaaagaacccgttttccggcctgtttattccgtcacgcttccacgcagatccgggactgaaaaaactgatttcctataatgccgacgtggccaaacaccttatctcgggcaaacttgagaggccggacgcttcacctgagactcttcggcccggggagggaaaaatcgtaacggtaaacggcaaacgggccggcgcctataaagatgaaaaaggctgtctgcatcttgtcgatacgacatgcacccatttgggctgtgaggtcgaatggaatgacggcgaacagacgtgggactgtccttgtcacgggtcccggttcacacctgacggcggggttgccgaaggtcccgccatcaagccgctgaagcgcctcagccaagattaactaaaccattctgtacgaatggttttatttttttcgcattaaaatatttttatcagattccttcattcaagttccttccataccgataaaaagaaaaagagaatatctgggggaacttatattgttatttaaaaaagaccgcaaaaaagaaacagcttatttttcggaagccgatggaaaaaaacgcatcgcgctttcaaatcaatatgcagatgtccaaaaacagctgaaaatggtcaggctcggaaacgaagaacttcatgtgcttgaagagctgcagccgttaattaaagaacatatctcaacaatcgtcgattccttttaccgaaacctggatcacgaaaaatcattaatgacgatcattaacgaccacagcacggtcgagcgcctgaaaaaaacattacggcgtcatatccatgagatgtttgccggcacgattgatgatgaattcattgaaaaaagacagcgcatcgcttccatccatttgcggatcggccttgaaccgaaatggtatatgggagcgtttcaggatctgcttctgtcgatgatgaacatatatgaagcaaccattccggatttgcatgagcttttaaaagcgatcaaagcgacgacgaaaatattgaatcttgaacagcagctcgtccttgaagcattccagagcgaatataactgccagcgtgacgaacaagaggaaaagaaagcccgtcttcatcaaaaaatccaggaaacatccggatcactcgctgatttgttttcagaaacgagcagagccgtgcaagagctggtcgataaatctgagggcatttccgaggcgtcaaaagccggcaccgtcacttccgtacatgtcgaagaaaaatcaatcggcgggaaaaaagagcttgaaagccagcagcagcagatgaataaaatcgacgccagtcttctgcagattgaagaagaaatggacaagctgaatgacatcgcacagcagatcgaaaaaatcttcggcatcgtgacggggatcgccgagcaaacgaatctcctgtcactcaacgcttcaatagaatccgcgagagccggggagcacggcaaagggttcgccgttgtggcgacggaggtaagaaagctttcagaggatacgaaaaaaaccgtttccaccgtatcagagctcgtgaacaataccaatacacaaatcaacatcgtgtccaaacatattaaagatgtaaacggacttgtaagtgaaacgaaagaaaaaatggcgcagatcaaccgtctgtttgatgacatcgtccaaagcatgaaaacgagcaaagaccagacaggcaaaatcgacgttgatttgcaggcctttctcggcggtcttcaagaagtcagccgcgccgtttcccacgttgcatcatccgttgattcacttgttatccttacagaagaataaagataaaccgaccggcctttttcataaagggccggtctttttaatgttaacttaaaatataatagagttgacatatataaagactcgctttattgtataaacatattttgataagctggaggaatacataatgaaattgacagaaatgatgcatattgccgtgtttaccgccattatgggacttttggggctgctcccgccgcttttcttatcctttacgccggttccgattacgctccagacgatcggtgtgctcttatcgggaagcatcctaaaaccgaaagcggcgtttttaagccaattgctgtttttgctgattgtggcatgcggagcgcctctcctttcaggcggcagaggcgggttcggggtttttttcgggccgagcgccggatatctcatcgcatatccgctggcggcattactgctgagcctcagcatccaaggccttcgctcagctgctgtcccccatttgtttatcagacagttcttgttcggcgtgctgtttttgtatgtcatcggcattcccgttcaggcttttatgatgcacattgatatcttaactgccgtaaagctcagcctcatctatgtgcccggagatctgcttaaagcggccgcagcctcattcgcagccgtaagaatcaggaaaactcttcaagcaagccggcttttgccgacgaaaggaagctgattttagtcatcatgattacatcatcatattcagatacagccggacaagcgccggaacagatcgcaattcagacagaaacagaacagatcacctatcaaacttggaacaggctagttaaccaaaccgcaaactggcttggcagcctttcaggtaagccggaaaacattgcaatattactgccgaacggcatcccatttttacaacttttcgcaggggcggcgcatgccggctgcacggcggttccgttagatccccgctcggcagcggcggaactcgcggaccagctgcacatcagcaaaaccggcctcgtcatctgtgaccgccggctgagcggcagactggacggcgtcaaaacgcctgtcatcctgtgggatgaatgcaggcctttgatcgaggcggaaaaaacggaaggcgcttttatcaaaaacgccggcctgcccttttataccggattcacctcgggatcgaccggtaagccgaaagccttcacccgctctcaccgttcgtggctggagagcttttcttgtacgaaacgtgaattcggcatttcccctgatgacaaagtgctggtaccgggcacgcttcgctcgtcacactttttatacggcgccgtcagcactttgtttatcggcggaaccgtcatccttcaaagaaaattcaacccggccggaatgaaagaccggctcagacaagctgacgttctatataccgttccgacaatgacggacgccctgctctcactagaggcgtttccggatacaccgctcaaggtgatttcttccggtgcagactggcccgcttcgtctaaacaagcgctgtcagagcgctatccccatttgcggttgtacgatttttacggaacgtccgagctgagtttcgtggcgttcttatcgcctgaagacagcgcccgaaagcctgacgcggcgggccggccgtttgaaaatgttacaatcgaaatccgccggcccggcggagaacgctgcatgccgggcgaaacggggaagatttttgtgaacagcccgatgaaattctccggatacatcaacggcgcaaaacctgatgattccggctggatgacggttgatgacatgggatatatcgatcgtgaaggctatctttatatcgaaggacgtgaaaacgggatgatcgtatcaggcggcctgaatgtattccctgaagagatagaacgtgtgctcaaccgctgtccgggcgtcagaaaagcggccgtcatcggcattcctgatgattattggggcagcatcgccgttgcggtgatcgacggacatgcaaatgtaaaggaactgaagaaacagtgccgcgagcagctggcggcatataaaataccgaaaaaatggttgttttcagaaataccggaaacagccggcggaaagatcgcccgtgccgccgtacaaacgcaggcaaaggacatgttggaatggaagctgtaattacggatgcgaaacggacaattttcgcccgggaaaacggcctgttaaaagactgtctcccagaagatttggcagctccgctgatccgccatttgagccggaacatgcccgaagacattgatgaagtcctgatcggaaacgcgacgggccgcggcgggaatctcgcccggctgtcggccttggccgccggacttcctttgagcgtgtccggtacgaccatcgacaggcagtgcggctccggactggacgccgtgagggtcgcgtgccactttgtcaaagccggcgcggggagcacgtacatcgcgggaggagcggagagcagcagccgttcccctttctcatcccgggcgcgcttttctcctgaacacatcggcgatcctgatatgggcatagcggccgagtatacggcacaggcttacggcgtaacgagaaagatgcaggacgaatatgcccttctcagctatgaacggagcgtcaaagcgcacgaagacggcttgtaccgccgggaaattcttccctgtcacggattcgccgtcgacgaaaacatgctgaaaaagcggaacatggagcctctcatctcccgcgccaagcccgtttttcagtccggagggtctgtcaccgccgccaacagctgcggaatttctgacggggcggcggcagtttgtgtgatggaagaacaaaaagcgcggtctctcggtttaaagccgggattgcgttttatcggaagcgcggtaagcggcgtccatccgcattatccgtcagcagctccggtttatgccgtcaaaaaacttttgaaggaacgggacctgtcaccggatgatattgatatatacgaaatcaacgaggcgtttgccgtcaaaatatgcgttttttcacagcagcttcgagtgccgtattctaaaataaatgtccggggcggcgctctggcggtcgggcatccgtacggggcttccggggcggcgcttgtcacccggcttttttatgaagcaaaaagacgcccggatgcccgctacgcagcagcagcgatcggcagcggaggcggagtcggactggcgcttctctttgaagtgttaacgtaacggcagtataatagatgatatcgataaaaaatgatcggagtggagactttatgactgccgtttgtttagtaagacatggagagactgattggaatgcccaaaagaagcttcaaggcaaatcggatattccgttaaatgcgacgggagagcgtcaggcgaaagaaacaggagagtacttaaaggggtccgaatgggatgtcatcgtctcaagcccgatgaaacgggccagaaaaacagctgacattattaacgggtttttgaatcttcccattgtggtcatggaagatttcagagaacggagctacggtgatgcggaaggaatgtctttaccggaacggtcgaagcgctacccggataaaaactacccgaacatggagacagcagaagagctgacagacagaatgcttgccggtttagtgaaagttcaggagcggtttcctgagcaaaaagttctgatcgtcgctcacggcgcagccattcacgccctcttgtcggccatttctgacggtgataccggcatccaaaacgcaaagcttgtcaatgcgtgcctgagcaatatcgaacgaattgaaaataagtggcgcgtcaaagattacaatgtaagcagccacctatcagaatcataacaaaaaggcccgaattcagttttgggcctttttggcgagcatttttttctgcagatcatgtaatatggcgtccgccccgtcaatgctccggcgctccgtccataccgccctgtccgcgcagtaaacgtgtccgttttttacggctgtcagctgtttccagaggtgatttttttcgagttctttctcaccgtccaacagtacgatgtaatcaggatcgatatgcaaaagctgcccgggcgtcatcttgatagagtctgatttcccgccggaatccgtctggaccgcataggtaaaccctgcgagcgtcaaaagccgggacgtaaaaaactgatcatcctttacggaaatgctgtcatttgcagcgtcaattaataaaatcgtgccgccttctgcatccagctttcttttgatgtcattcagcttttcttcctgagccgacaattgtttctctatgatgccatctttaccgaccgccttttcaatagtaagggcagcgtcaaccgcatcctgataatccgcagcttcattttttaaagcgattgtcggagcgatctttgtcagttttcggtatatccccctgtgaaggcttgagtctgcaatgatgagatcgggctttaacgaagtgatctttttcaaatcgggatgtgacgggggcccgccggacggactgccgtcgtttcgctctgtccgattatccgccgcagccacaggctttatgccgagatcatggagaatatcattaaagcccggattcaacacggcaacgcgctgcgggtgcgcagccacatgcgccgtccccagatcgtgcctgacggcggtttcatgttcctgttctgagcatgccgttatgaagagaacggataagatcatcagcatactgaaaatttgtttcatctgttccccctctttcgtttttccgcaattatatcattgacaatataagtatcaatgatattcattatcattatttttataaaatggtttcacagcttttctccgtcaagaaagccgaagactgattcatgccggccgctttatttcattccgctttcgtttccatcagacttctgcattcaacaaaaggtgacatttatcctgtttttgccgcagcttccgaaaatggaatcaaaccgttcgacccagcaaacaagagagcgattgcggctgtgtacaaatactcatgtccttccatcggttttttccattaaaatttaaatatttcgggttcctattaaacgaaagagagatgatatacctaaatagaaataaaacaaattgaaaaaaattgggtctactaaaatattattccatgctatacaattaatccacagaataatctgtctattggttgttctgcaaatgaaaaaaaggagaggataaagagtgagaggcaaaaaggtatggatcagtttgctgtttgctttagcgttaatctttacgatggcgttcggcagcacgtctcctgcccaggcggcagggaaatcaaacggggaaaagaaatacattgtcggatttaaacagacaatgagcacgatgagcgccgctaagaaaaaagatgtcatttctgaaaaaggcgggaaagtgcaaaagcaattcaaatatgtagacgcagcttcagctacattaaatgaaaaagctgtaaaagagctgaaaaaagacccaagcgtcgcttacgttgaagaagatcacgttgcaaaagcgtacgcgcagtccgtgccttacggcgtatcacaaattaaagcccctgctctgcactctcaaggcttcactggatcaaatgtgaaagtagcggttatcgacagcggtatcgattcttctcatcctgatttaaaagtagcaggcggagccagcatggttccttctgaaacaaatcctttccaagactacaactctcacggaactcacgttgccggtacagttgcggctcttaataactcagtcggtgtattaggcgttgcgccaagcgcatctctttacgctgtaaaagttctcggcgctgacggttccggccagtacagctggatcattaacggaattgagtgggcgatcgcaaacaatatggacgttattaacatgagcctcggcggaccttctggttctgcggcgttaaaagcggcagttgacaaagccgttgcttccggcgtcgtagtcgtagcggcagccggtaacgaaggcacttccggcggctcaagcacagtgggctaccctggtaaatacccttctgtcattgcggtaggcgctgttaacagcagcaaccaaagagcatctttctcaagcgtaggttcagagcttgatgtcatggcaccaggcgtctctatccaaagcacgcttcctggaaacaaatacggcgcgtacaatggtacgtcaatggcatctccgcacgttgccggagcggctgctttgattctttctaagcacccgaactggacaaacactcaagtccgcagcagtttagaaaacaccactacaaaacttggtgatgctttctactacggaaaagggctgatcaacgtacaggcggcagctcagtaaaacataaaaaaaccggcgtcggccatggccccgccggtttttttattatttttcttcctccgcatgttcaatccgctccatgatcgacgggtggctccctctgaaaattttgacgagaaacggcgggttgactcggctcagtcccgtatcggccaagtcctgaaacgtctcaatcgccgcttcccggtttccggtcagctcgatgccgtaacggtcggcggcgttttcctgataccgggagacggcattcgtaatcggatcagaagcaaaactgagaacggatatgagcagcaataacagcgggagggcggccagatcttcaggcccctttatatgaagcattcggccgaagaatttggacagccgcttataaagcttgtcaatgatatagaacccggctaatgacagcaggagatacccggccagtccgatgtacacgtgcttcatcacatagtgccccatctcatgccccataatgaacaaaatttcccgatccttcagtttgttaagcgtcgtatcccacaaaacgattcgcttattcgaaccgattcccgtcacatacgcattcagcgcattcgttttctccgacatatttacttcataaacatggctggccggaatatcagccttatcggcaagcgacaagattttgctttccagctccttgtctttcagcggatagaaatcattgtataaaggatcaatcacgaccggctgcaggaaaaacaaaaacagggtaaacggcacagtaagacaccaagcgtaaaaccaccatttttttgtatgcttcgtgatcagccagtaaaacacaagaacacacacggcaaacagcggaaaactgatccagaaatcaatgacatggtctcttatccagcttgctgttgtctgcgtcgaaatatgatacgcaagcgaaacccgatatccgatccattcaagcggaagcgaagccgccgtaacgatgagtgaaatcacaaatacgaagcttccgatttgcagcacccgaaagcgcaccgctgcttccagccaatgctttatttttttggcaagccccgtaatgagcagcagaaaaaataaaaaccaatctaacggcgcaccgatgaaaaataaaaaatcctttacatttgaaaagttttcagcggcttccaggcggcccgggtccataaacgaggacggatcggctttcgttccctttacggcctccgggacggcggagtcgcctgtcataaagaaataccaatagaaaaaaaggccgtacagcacataggcaagtcccgctgccgctatccatttgcgcatggaagtctccctccttagccttatgacttactcctattgtaagcataaatgcaaataaatagaaccaagcctccgaaacggatgttaatcttttcacaacagaaaagaatggaacaacaggaagcgggaaagactaaaaaacggagtgatgaatatgaaaaaaataatcgcgtttattgtagtaatcgcccttttggttattgctttcttctatgtatacagccggaccggcgatgtgtttccatcaagcaacgcagatctgattattctgtctgagcacggaaaaaaagaaatcaaaattaaagacaggcagaatgtaaaagatatgctcgatatcttgaaccaaggaaaacaagtcaaactgaccaaaagtgtatctcccgattacgacggaacggtcaaataccatgaagaccgtttcgattcattcagcatgtggctcgaaggcggcaattatatgctgtacaagtataaaaacacgtattacaaactgacccggcatgatacgaagcttgtgcaaagcatcattaaggaagaatcgcagagctgaccggatcagcatgtaaaagcgaagccccccggcttcgcttttcgtccgtcatttcggaagcatgtcccggaccgcccgcctcagcagcttcccggtcgcgttcttcggaatctcatcaagaaaaaccacttccgccggccgtttatattttgccaaatgtgtttcacagtaatcaaaaaccgcctgctctgtcagctcaccgtcccccggcactatataagcatgcaccgcttcccccgttttggcgtcaggaacgccgatgaccacggcttctttaatgccctcatggctgtagagcacttcttctacttcgcgcggatagacgttgtatccgccgacgagaatcatatctttttttctgtcgacgatataaaaataaccgtcttcatcgcgcttcgccaaatcacccgtgtacagccagccgtctttcagcgcgtgctccgtctcctcgggcatcttgtaatagcctttcatcacattcggccctttcacgatcaattctcccacttgatggtcgggcaattcgcgtcctagcgtatcgacgactttattttcgacatgtaaaatattcgtcccgattgagccgggctttctcccccggtcaaacggattaaaacaagtaaccggagacgcttcagaaagtccgtacccctccagaatggtgacgtcaaaggtttgttcaaacgtctgcaacagagcaacaggcatggaggccccgcctgaaatgcacagtctgacggacgtaaaatcctccgccttgccgtgctcgtattgatacagatagttatacatcgtcggaacgccggcaaaaatggttgcctgacggcttttaatcagtttaaacacagaagccgggctgaattgcggctcgattaagacacacgctccgctcatcagaggcgcattcatacaaacggttaaacaaaaaacgtgaaacatcggcaatgccgccacaattttgtctttctcattcattcctaagtatccggcgacatcatttgcattggagaaaagattctgatgggtgagcatggcgcctttcggttttccggtcgtccctgaggtgtataaaatgacggcagtatcatctttggacaatgtcggataagttctgctgcgctccgccgggcgaagcatttttgtaaacgttgtcatttttaagcgcaattgagggtcttctgtcgatggagcgttctctgctgtctggctgataatgatatgctccagcagcggcagcgagccgtgcaggctttcaaatacgggaattaaaaggtcgatgccggcgatcgctttgacatcgccgtttttcagcatgtatgcgatttctgaaggtgtatataccggatttacaggtatgacgacaattcccgcttttaacgcgccgaaaaacgcaataacaaaatcaggcgtatttccgagcagcagcgcgagatgatccccttttttcagtcccctgtcctccaagccgtttgcaaatgctttgattttacctgccagctcctcatacgtcatgtactgatcttgaaacagacaagctggtttttccggtttctgcgatgccgtttcttccaatttggaaaccagattcattttcccacccctttaaaaattgtaatgaatgaatagtcattcatttatccggaataaacgttcacttttattatagaaaaatatagaaaaacactcaagggcaaaaagccccgagtgccgtaaaaccggaaactataattgtttcagcgcttcactgaccggcgtgccgcccgctgtcagatcgaacgctttttcatacgtattcggttcatcaagagatgcgataacggtcttggcgacatcgtctcttgaaatggaacctctttccaaatcggccgcggctttgatatttcctgtgccgggatcatttaataacccgcccggccggataatcgtatacgtcagaccgctcgcttcaagaattttatccgcataatgctttgcggcgtaatacggcttcagcgcttcattccaattgccgcggttatgagcctgaagggcgcttaccataatgaaccgcttgatgcctgctatctttgccgcttctatcgctttcgcggctccgtcaagatcaatcaaaagcgtcttatcgtatccggtgcttcctcctgatccggcggtaaacacaatcgcgtcacagccttcggcggctttcgcgatgtcttccgggcttccttccaaatctgcaagaacggcttctgttcccgcggcttgaagcgcttctttctgctcttgtttccggaccatcgcccgcagcgtatgcgtgccgtctttttgaaacagcccggtcagccgctgtccgatctgtccgtttgctccgatgagaaatactttcatcatgatccctccccattcattatggttctatcatttcacaaaaacgggcgctgattcaaatcatgcgttcggcaaatgttctaataaatcagctcgaggaaatcttccagctctattttgccgaaatactgtttcagatcgattccggccagcgcctccttgatagcggttcggtcatactgttttccggtcagcgcctgttcgacttcactcacatctttcgcaccgaagaaatcaccgaaaattttgcagtcctgaatgattccttttttcacttcaagacgcagatcaatcgatccgaccggataacgtttcgaatgctgaagattaaatgcgggcgaccttccgaaattccagtcccagttttgatagcgctcttcggaaatcttccggatcgctttccagtcttcatcggtcagtttatattccggcacttcggaaagatcatttgtattaaaaatatggtgaagcaggtgctttttgaattcatccgccgtcattttgtcatcaagaaactcgctgatgttggcgacacggcttctgatcgacttaatgccttttgattcgattttgtcttttttcactttcaaggctgacacaacatgatcaatggcggaatccagcattaatgttccgtggctgaaaatacgccctttcgtcgaaaattgagcgttgccggaaatttttctgccgtccgcgacgatgtcgtttcggccgcttaattcagcttccacaccgagctggcgcagcgcctgaataacgggttcggtgaattttttaaaattgtgaaagctgtcgccgtcatccttggtgataaaactgaaattcagattcccgaggtcatggtaaaccgcgccgcctcctgacagccttcggacgacgatgattccgttatcttctacgtatttcgtattgatttcttctattgtgttttggttcttaccaatgataatcgacggctgattgacataaaacagcaggtatgtctgttcagggtcgagatgcttcacgcaatattcctcgatcgcgaggttgatcctcgggtcggttatgttttggttgtcgataaataacatggtgctcctcctttatttctcccacttcaatccggaagcggcgattgtcacttcgcccccgaacacggattccgcttcttctttcagcttccggtgctcgccgaaatgaggcagatgcgtgagaatcagctcccccgctccggcctccttcgcgatacgtccggcttccaaactgttcatatggccggctgacgtgccgtcctggtccgcgtaaaaattgcactcgcagatcagcagatcggcattttccgcaaaagggataaacgcgtcctggtagcttgaatcagccgtatacacaacagaagctgaaccgtcagtaatccgcatcgcataacaagtgaccggatgcaccgttttcagaaaggtaatggtgaacggacctagagaaagcgggcggtccggctgataggccactccctttgtatgcgttttatatgtaaggcgctcaaactgttctatatcagcatcatgcccgtaaatcggcagtgcatgcgtcccttttccaagaaaggagccgacctgtttggcaaattgaagcggcccgatatcagcgatatgatcatggtgataatgggacaaaatgacggcatcaagctcttctgccggaacataggcaaacagctttgataatacggcgcttccgcaatcgacgagcagagaatagccgccggactgaaacagatagcctgaagttgcttcgtttgcggccggaaacccgccgcagcatccaataactgttactttcatataatcctccgaatgtttatgataaaaagatcctttcctccaatatacctatttttcgtacaaattgcatgttttaaacattgtgtcaaaacagccgttgattttccaaaactgttataatacaatgtaaagacaaaacaatgaaagagggatgggtatgttggaaaagatgtcggattttttcagaaatttacccggtaagaaatgcgaagaatgcggaaatgagattgttgagcagtatgagtgtcacattaatctgtgcaatgactgcttgaaaattaaggatatgtgacaatagggcgccgcacaattctaagttgtgcggcgcccgttttttcggccctcatcatactttctgaatagggcgttattcaccattattagcaattatctgtacgttttaaaagattcagtattttcaatctatatttttctatagacggattgttttcttttctattataatttgttctaatagctatctttttagatacttattgcacttttttcttcgggaggtaatctatgaaaaaattacgctttggactagcgacgcaaattttcgtcggactcatactaggggttgtagtcggtgtcatctggtacggcaatcccgccattccaacatatttacagcctatcggcgatttgtttttacgcttaatcaaaatgatagtgattccaattgtcgtctccagcttaatcatcggcgttgccggcgcgggaagcggaaaacaagtcggaaaattaggcttcaaaacgattttgtattttgagatcattactacttttgccattattctcgggctggctttggcgaatctgtttcatccgggaacaggcgttaatatacatgaagctcaaaagacagatatcagtcaatatgttgaaacagaaaaagaacaaaataacaaatctatcgcagacacattcctgcatatcgtaccgacaaacttcttccaatcattagccgaaggagatctgcttgccatcatctgctttaccgtgctgtttgcactcggcatctcggcaatcggtgaaaaaggaaagcccgtattggccttctttgaaggtgtttctcatgcgatgttccatgttgtgaacctcgtcatgaaagttgcgccgtttggtgtttttgcgttgattggtgttaccgtttccaaatttgggctcagttccctgctttcactcggtaaactggtcggtttagtatatgtagctttggctttctttctcattgttgtattcggaatcgtcggaaagcttgccggagtaaacattttcaaattcctcgcctatatgaaggatgaaattttattagcgttcagtacgtcaagctccgaaaccgtactcccccgcgttatggaaaaaatggagaaaatcggctgtccgaaaggtattgtttcctttgttgtgccgatcggatatacctttaacttagacggatctgtgctgtaccaatctatcgccgctttattcctcgctcaggtataccacattgacttgtccatttggcagcagattacccttgtgcttgtcttgatggtcacttccaaaggaatggctgccgtgcccgggacttctttcgtcgtcctgcttgcgacattaggcgcattcaacattcctgcagaaggccttgcattcatcgccggtgttgaccggattatggacatggcccgtacggtcgtcaatctgaccggaaacgcgctggcatccgttgtgatgtcaaaatgggaaggccagtatgatcccgttaaaggcgcgaaggtcatgagcctcgccaaaacagaacaaaacacaaccatctcaggttaaaatgaaaaccctgcacggaatgatttccgcgcagggttttttatgccatcggcgatagaacgtaccggtgcaaaagcttcgccgtattaagaagcgataattcatgcgtgcgttcaaaagcgtgtgaagcgtcaattcccgggccgatcagcccgtggacgatgtcatggcccgaacggatggctgctgaggcatcagaaccgtaatacggataaatatcaagctgataatcaatgccatagcgctccgcaagcccggccagatgttttctgagctgataatggtacgggccgctcgcatccttcacgcaaatggagacggtatattcatccgtagactggccgtcgccgatcgctcccatatcaacagccaagtattcaacggtctcaggaggaatgttagaattgcctccgtaaccgatttcttcattattagaaatcagaaaatgcgtcgtatacggaagttcgattttctcttccgtgatgcggcggattaaattcaagagcagagccacgctcgctttgtcatcaagatgccgggacttaataaagccgctcggcgtaatctgcacgcgcgggtcaaatgagatgaaatcgccgaccctgatgccgagatcggacgtctcttccttcgtccggacaggctcatcaaggcggacttccatattctcctgattccgctctgccttgccggcgtccttgtagacgtgcactgaagtctgatgcattaagatggtgcctgtataggttttgccggaagaagtttggatctcgcaatattctccttcaattgagttatatcggaagccgccgatcaagtcaatcttcagccggccgtccgcctttatctcctttaccatcgcgccgagcgtatcgacatgcgccgtcagcaatctgtgtttcttatcatcacggccgggaattgtgacaaaaagaccgcctttgcggtttctgtaagaggagacgccccattcttttaaaagactttctgtataggcgataacctcgtatgtattgcccgtcggactcggaatcgacaccaattctttaatcagttccatcgtatgtttcatattttccacaggtcattcctcctatcaattttattcttcttaaaatatactcttttgatccataacccgtccaatcttttccttctcttttttcatagaatgaagggagcatgagcataggagggaaatgtatgatcagccgtaaaccgcacaagcggaaaaggtttcataatgattggtttgaggattggtttgaggatgattggtctggtgcagccttctggggctgtaaaaaagaagaagatcactgtaaaaagaaaaaagaagacccttgtaaaaagaagaaagaaaaaaagaagcatcatcattcatgccgccgctgctgccgtcattggtaatcgttcacacaagcccgttttacaaatagatttctcatgctccccaaacagcggatgctggttgggtttttttattaaaattagtactaagtaataatatcaggtgttataatctgatataaaggagtgattttttcatgtcaaaatctaagattacagcaatcggtacatatgctccggcacgccgattaacaaacgcggatttggagcgcatcgtcgatacatctgatgaatggatcgtccagcgcaccggtatgaaggaaagacgcattgccggcgaacatgaattcacatcggatttgtgtgtggaagcggtgaaaaaccttgcagaacgatacagcggaactcttgatgatgtcgatatgatccttgtcgccacaacgacggcggactatgcgtttccaagcaccgcggcacgcgtgcaggcttacttcggctggccgcacacgggggcgcttgatattaacgccacatgcgccggactcacttacggccttcagctcgcagacgcattaattaccgccggttcccatcaaaaagtgattgtcattgccggtgaaacattatcaaaggtaacggattatactgaccggacgacctgcgttcttttcggagacgctgcaggcgccctattggtggaacgcgatgaatcagcgccgggcttcttggcagccgtgcaaggaacagcgggaggaagcgcggacgtgctgtatcgcacgggactgagcgcagaattaaacggcgagccgcttaaaggcgaaggaaacatggtgcaaaacgggcgcgaagtatataaatgggcggccagaaccgtgcctgaggaatgcaatgcccttttagaaaaagccggcttttcaaaagacgatctggattggttcgttcctcacagcgccaacatgcggatgatcgaatccatctgcgaaaagctgcccttcccgcttgaacggacgttgacaagcgttgaatattacggcaacacttcatcggtttctattattctcgcattggatgaagctgtgaaagcaaaaaaactgtcggaaggccagacgctggtattattcggattcggcggcggattgacgtataccggactgttggtgagatggggattttaatagtacgacgatcgaaatctaaaaaaagaggccccgagcatctgctcagagcctctttttcttatgctgttatttcttcttccgttttgtgttcttttttgctttgcaccgtaaaatacacgatggtcagcgcgatcatgacaacggcgatgcccaacagaatggatgcctgctgccacatatagccgtaatcgccatttgaaatgacggcgcggaatccgttgatgctgtaagtcatcggcagtgccccgtgaatcacttgatagaatcccggcaggagttcaagcgggaaggttcctccgcttgccccgagctggagcaccagaatgatgacagcgataaagcgtcccggatttcccatcgttgtcgccaataattgaatcatggacaggaacgcgatgctggtaatcattgtaaatagatagaatctccacgtgctttccacatcaagcccaattcctttcaacagaaccgtggcgacaataacggattgaatcagtccgacaagcagaataacactgaatttgctgaggaaccattcaaaaccgtttctcggacgccctgaagcttcactcagagggaatacgaccgtcagcatcaatccgccgacatacaagcccatagagagaatataaggcgtcagtccggtaccgtagttaggcacggaatgaatcgcgttatcgtccgtttttaccggatcggcaaacatgctgtacgttttgtcatctgtcttaatgtccccggtttgatcggccgcatctttcagctggctggacaattgtccggtgccgtctaaaagtttgcttaaaccggtgccgagagacgcttgaccctgctcaattttggacgagccgtcatggattttgttttgcgcgtccagcagtttcgttaagccgcctgacacttggccgctccctgacactaacgcttctgatcctgatttgagctgtccgaacttgctgttgtattcgccgatgccggctgtcagtttgttttggctttcaaaaacggtctgcgctccgctgtacaatttatcagttcccgctgtcagctggttaatcgcgtcttgtaccgccgctgcgccgttatacagtttcgatgtggactgaggcagtgctttcagctgatcagccttcgcttttacatctttgagcgcgctttttatgactgacatatccggaagctgaatatctccgccggacggaagctggctgacgatattgtctaaatccggaaggtcggctttcggaagcttctcattcagaagctgaacaagtttcgctttttgctcatccgttaagaaatcactgtccttaatcacctttttgaccgcgtcatcccgggcatccaggctgtttttcagatcagaaagcttcttcttaaactgctgcaggtccttttcagtctgttcgagctgcccaaccgcgttttcaatgtctgacaggttgactgaattgatcgcatcttcaaatgccgccgctttttgcgacacttcctgcgccttgctgtttaacgcgcttaatccattcgttaaatccggaagcttttgctggagctgcttttgtgcgtcaaggcttgttttcagcccgctggccacttggcctcctcctgaagcaatctgtcctgatttatcttgaatttcggcgcttgcgctctgaagttttgcgatagagctgtcaagcgtttgaattccgcttgtcactttcgccgcgccgtctgcaagctgctgtgttttatcgccgatggtggcagtgctttcagtaagcttcgctaaattttccttcagcttggcgctgccgtctttcgcgtttttcgtgccgtcgtctattttcttggctccgctgctggctttgccgagccctttggcaatatctttaaagttatcaaaaatgacttttgcgtattgctctgtcacttctttcgacacggaggctttcagtttgtcgatcgccttttccccgattgtcgcgccgacatagtttgatccggcattcgtatgatatttcagatccagcttcttcggatttttatccattaccgtgctggcgtttttagaaaaatcttcaggaatctcgaccaataaataatatttagcatttaataagtcctttaacgattgatcaagatcgcttgaaaaatgccaatcaaaattatcatttttctttaactctttcacaagatcgtcaccgatctgaagatgtttcccttcgtagtccgcccctttatcctggttgacaacgacaaccggcagctgatccaccgtgccgtacgggtcccagtacgccttcaaaaacactccgctgtaaatcagcggaacgaataatatggcaatgatggggattaacagtttcttgttcgttacaatgtctttccactggctttttattgtattcaaccctgttgcctccttccgcaaactgactcatttgacaaaacggtcacggcacctaaaaagtgaaggatcatctattatttagataatccttgaccaacatacatttccagcaattcagcgatcgtctctttttcaagaggcggatggtttttttcccagtcaaatatcagtgcgatgtagagcttgagcatcacaaaagcggtcagttccggatcacacggtttaatgcttccgttttcaatggctgtttctatcttttctttaatgtatgacagaatggcccgctccattttcacaatgacatcctgaacggctattgtaccaatctcggcgttctcctgaaaaattttaatagtcagctggtgtgtttttctgaattccaaaatcgcgacaagcgcccggtggacattttcgtgaaatgaaagctccggtttcatcgcttcgtctgcgtgttccttcatttctcttaaaatagtggtgaaaatatcatcaaacagttcttctttgtttttgaaaaacgtgtagatggttcccttccccacatttgcaagctttgccaccagatccattgtcgttgctttgtagccgaattgtgtaaaagacttcgttgccgcttccagaatgagctttttccgatcgacggacatgtttcccacctcgttaaattgaccgtttgaacgttttagtcattttgtacataagataacttatcacagtcacaaagaagattcaaatgttttctctctttattggtgttccctttacagaacgggaacatgcaaaaaaacctccgttttacgataacggaggctggtacgtttcaaataaataagccagtgaatcgtatacggcggcttttccctggtcgatacagtcggggatgcccaccccttcgaaagacgcgcccgtcgcgtatacgcccggataggaagctttcagcgcatctctgaactctttgatgcgctccttatggccgacatggtattgcggcatgctttcgttccagcgggtcacacaggtcatttccggttcgccatttattttcattacttttttcaaatcttccattacgattttaatgatctcgttatctgaaagatctacgatggattcatccccggcctttccgacgtacgccctgagaagcgttttgccctccggcgccgcgtgcggccattttttattcgtccatgtgcaggccgtgatggagaaatcgctgtttcttgagataacgaatcccgtaccttcatgctccatcttgacggcaccctcagggaaacctaaggcgacgttggcaacggacgtagaatgcatgtctttaagacatgaaaccgccggcagatcagaaagcattttcgccgcggctttatgcggagctgtcactatgcatccttccgcatagagcactttgccgttatcaagcgtcacagaatatcctttctcctcgcggccgatatgggtgactttcgttcctttcatcacccttgtcagcgtaagctgcttttccagctcctccaccaacgtttgaagccctgttgtcagcgttaaaaactggccctgctttttggctgtcagctgctgtcccgaaggctgcggacgcgattttttcatgccgagaatcaggcttctgtgcttctgctcagtctgatagaattgcggaaacgtggacatgaggctcagcttatcaatatctccggcataaatccctgataatagcggttctattaaattctcaacgacttcgtcaccgacgcgtctgcggaaaaattcacccagagactgatcttccttcggtttgctcgcaggcaggacaaagtcaagcgccgcccgcgcctttccgggaacagaaaataaaccggtggagatgaacggagcgattttggtcggaatgcccatcaccgcgcccttcggcatcggatggagcgtctcgttgacgagcacgtaagactggccggtcgcattgttgacgagcagatgctcaagccccaaatctttgacgagctgcggcgcgctttttttcctttccaaaaaagaatccggcccccgctcaatgatgtagccgtctttatgctgcgtctgaattttgccgcccgctctcgggcccgcttcaatcagagtgacctcaagcggcagctgttttactttgatttctttttccatgtagaaggcggcggctaatcccgttatgccgccgccgatgatgaccagatgttttttatcgccactcatttttatcgccttctttaccgtttaattctacttgtccagctctttcagcacgaccgctgcaagcgcgtcgataaattcaggctgtgcgttcggcatagccggacgatagtagcttgcgccgacttcttcggtcacagctttgcattcataatcattatcgtaaagcacctctaaatgatcggcaacgaagcctgcgggcacgtatacaaatgctttataaggatgcttttggtacagatcgcgcgtgagatcctgcacatccggcccgagccacggatcaggggtattcccttcactttgccagccgactgcgtaatcggtaattccggcgccttcggcaatcagttttgcggattcctccagctggtcaggatacggatcgccgtattctttaattttttcaggaaggctgtgcgctgagacgatcagcatcgcgtcatcccgttcttctttcggcattgattcatacgttttcttcacctggctgacccaataatcaacgaatttcggttcatcataccagctttcaacagacttgatggtcaagccgcctagcttctccgcttcttctttcgcgcgtttgttgtatgactggacgctgaatgttgaaaaatgaggggcgagcacaaggctgacagcttctgtaatgccgtctttatgcatgtccgccaccgcgtcttcaataaacggttcaatatgttttaatccgatgtacactttgaatgttacgtcatcctggatttcatttaaacgctgtgcgagcttctccgcctgctcctgcgtaatttttgcaagcggcgaaatgcctccgatcgcttcatatctgtcttttaaatcttgaagcatatgaggctccggctttcttccgcgtctgatatgcgtataataacgttctatgtcctcttctttgtaaggcgttccgtaagccatgacaagaagtcccattttctttttgctgctcattttgttaaacacctcttttgatggtctgtctaccttgattttgacaggaaaatcttcttataaccaacgatctgctcaggaagattgttccgtttttttggccgcggaatattcatgtacaaacgccgtcagctttttcagcgttgccggattgacatctgggaatacaccgtgccctaaattgaaaataaacccgtccgttttcatgccttgatcaagtatcgctttcgcttttttctcgatgacttcccaaggcgcaagaagaagcgacggatcaagattgccctgaaccgtttttgtaatcccttgttttctggcgtcatctatgccgagtctccaatcaagaccgacgacatcaagaggaaggtcatgccaatccccggccagatggcttgcgcctacgccgaacatgatcagcggaacttgttctgctgaaagctcccggaaaattctgtccatcaccggttttataaactgccggtaatcttcgcggttcagcgcgccgacccatgaatcaaagatctgaatggcttttgcgccggcgttaacctgcgctttcgcataaacgataatcatgtccgcgagcttgtccatcagcatttgccacgcttgcggcatactgtgcataaatgcttttgttttgttgtaatttttagaaggcccgccttcaatcatataactggccagcgtaaaaggcgctcccgaaaaaccgatgagcggaacattcagctgttcgtttacgagtaatcggatcgtttccagcacgtaaggaacatcctgttcgggattcagttcgccgagcttttcaatatccgcagcagagcgcaccggctgatcgatcaccgggccgattccgttttttatttcaacatccactccgatataaggaagcggcgtcataatgtctttatataaaatggcagcgtccactccgtactgctcgaccgggagcctcgtcacatacgcgcacagctcgggctgatgcgtaatttcgactaagccgtacttttccttcagcttgcggtattccggctgagacctccccgcctgtctcatgtaccagacagggacgtgatttgttttttctccccgtgccgcttttaaaaacgtatcattaaacgcttctcgtttactcatctgaatttccacctttcctcctgcaaccatacgttcgtgttcttcgcccattacactataccttgttttttcaaaagcgtatagaattgaggcttaatgttcaaaaaatcgccgaattcacgattaagaagaaaaaagcttcggctgaacgtattccgttccctctccttcttgatccgtctgtgaattatatggaacgactttgtatgaagcccctgaaaacagattggcgtacggtatgtcaaagctgccttttcctttcaccgaatccagaagtttgtcttttccgtctttcttctcatatattcggtaaacaacccgatcatccttttgaatatcccattttaattgaaccgtaatcagtcccatcgccttaaatgtataacgggccgacagggactttaccgcctccagctcaatcgggctgcccagttccttcacattttcaggctttttgaatgtccggccgttttcccccgcttttgtgacgatatctttaaagagtctgaccgggtattggcttccgcctttcaggtaatgggttttatccgttttgtcatagcccatccagacggctcccgtcagtccgggagtgtatcccgcaaaccaggcgtcctttgtcgcgccggggacgccgggaaatgtggtcgtgccggttttccccgccaggtcaccttgatagctgccttgtgaagcggttccttcttttacgacctgctgaagcattctcgtcatattccatgccgtctgtccgctgaagacgcgcgttttgccgtttttaggcccggacaacgtttctccgtcttcgtccgtgatgttctctataaaaaatggcttcgtatacattccgtttgccgcaaaggtatgataagctccggcaagctgaagcggggtgacgccttctgacagaccgccaagcgcaatcgcgagtccgttgtcagaaatgttcatgccgtttttctcaagatacgattttcccgtatccacgccgatctgcttcaatgtccagacagcgggcgcatttatgctgtaagtgatcgcatcctgcatcgtcacttcccccttgtactgtccgtcataatttttcggttcatacccgtcgtaggacgtcagtttgtcttggagaagcgaatacggtttgaacttgtcttcctgcatggcgggcccgtatacggcaatcggcttaaacgttgagcccggctgccgcttcgccgtaaccctgttgtatccttttgtcacgtagtcgcgtccgccgaccgccgcgcgcacgcctccggttttattatcaataaagacggcgcttccctctgccgcctgatccgtccccggaaaatagccgctttccttcatgagggtgtatgccgttttctgcagcttggaatcaagtgacgtccggatcgtatagccgccttgaagcagctgttcacccgacatcgaataacgggattccgcctccttgatgacaagatcgatataactgtcaaaccaaggcgtttctgatgttttcttgacatgaagccccaatgtccggccctgggctctgacggcttccttggcgctgatatagccttggtcgttcatcattgcaagaatcgtatcgcggcgttctttatttttatccggatgctgaatcggcgaataaagagatggcgccttcggaatcgctgccagaacggctccttccgcaacggttaaatcttttacttctttattaaagtagtagtgggacgcggcttgaatgccgtaaacgccatggccgaaataaagctggttcaggtacatttcaagcagcttgtccttgctgtaatcacgctcaagattgatggcgataatgacttccttcgtcttgcgcaaaaatgttttatcatgagtcagaaaaatgtttttcgccagctgctgggtgatcgtgctgccgccctccaccttgccgcctgctaaaacatcccggaacaccgcccggccgacagacttcacatcaatcccgtgatgttcgtaaaaccgtttatcttcaacggcgataaaggcatctctcacatcttccggaacctgctgaatggataccggctcgcgattttccgtatagaggctcgcgatttcatcgccgttttgatcgacgatttttgaagatgcgtgcagtattaatttcttttcgtcgatgacataatggccgagaaatataatgataatgtatccgattaacgcgagaaaagcggttgccgccgcaattacagccggaataaagaatctttttttctttttcagcataagtcacctcgcctttcttaacttgtagtatgggaaatattgtttcgaattatgtcagaatgagtcgccaatagaaacttataccactcttttgatatactagcaagcaggaggtggctgatatgaaggtttatattacatacgggacagccgattttttaaagacgattgcaaagaaacacccgagtgagaatatggtgctgatgcaaggggaggataatgcggttttaattcatgaaacaaatggagaaaccgtttttcaggcgccccattcctatgaaagcatcgacagcgtcggggaaatcaaaaatccgggatacgccgtcctcaacaacatcgccgttacccaggaaggccgtccgctgtttgaaaaccggtttaaaaaccgcgccggcaaagtggaaaatgaacccggttttaaagccatccgcgtattaagaccgctcgaaggcgatacgtatgtcattttgaccctgtgggaagaggaaaaagcctttcaggattggcagcagtcaaactcttatcaggaagctcataaaaaacgcggaacatctgccggcatcgacacgacgtctattttctcccgcccgtcttatgtaaccgcttattacgcaatagactgaaaaccgccggagattctccggcttttttaatgtcccgattttacgcatccttctttgcaccttccgcccgcctatgaataacctgtagcaatcctatttataaacggagtggttcaattggggatcggcgtctattcggtacatctgctttatgttgcttttatcgcggccattatcgtttttatgctcctcaggaaagatacaacctttatttcactcgccggcatttttgtgattgcgctatggacgacgcattcattctccgcttcggtcagcagcctgtttcacagcttcacgtatgccgccggagaattgctgccgacgatttttatcatttgttttatcgtggcgatgagcggccttttgaccaaaaccggtattaatgaagcgatgatttctccgtttgcaaaggtgatgaaagggccggctgtcgcgtattgggttatcggctgtctgatgtttgccatctctctttttttctggccgtcaccaggagtggcgctgatcggcgctgtgctgcttcccgcagcgatccgagcgggcctttctccgatcgccgcggctatggcgatgaacctgttcggccacggattcgctttatcgggggattacgtcattcaggcggccccgaaattaacggccgatgccgcgggcattcccgtgagcgatgtcatgcaggcaagtattccgctcgttttgatcatggggttaacgacgacaatcaccgctttcttcctcatcatgcgggatcgaaaaaaaacgaaggcccccctctccttggacagctccggttctttggacacaagtatgtatctgccgaaaaacctcagggtgatcctggcggttttcataccgcttgtgtttctcgccgatattatctgtatgatcgtataccgcctgcaaggaaacgatgcgacggcactcgtcggaggaaccgcgatcggcattctcctgatcattcatttcattgtatataaagagcggcatttagaaaagatcaccgagtattttatcggcggttttcaattcggctttaaagtattcggccccgtcattccgatcgcggccttcttttatctcggtgacgcggggtttaaaagtattttgaacaccccgctgccgaaaggatctgcggggatcgtcaatgacctcggattggccctgtcccattcttttccgatgtccggagaatttgccggcatcgccctgaccgcagtcggtgcgattaccgggctcgacgggtcagggttttccggtatatctcttgcaggctcgatggcaaagctgttttccgccgcgcttcatacggacccggccgttttaacggcgctgggccaaatttcagcgatctgggtcgggggcggaacattggtcccttgggcactgatccccgctgcggctatttgtaaagttgatccgtttgagcttgccaggaaaaactttatcccggttgcggccgggctagtcgtcacaacgatcgccgccatcatcattctcccgtagcaaaaggattgaaatcttctgacattttctatacaatcatgggaaaagcagacgaggggggcatcgcttttgacgttaacgacacttcaaaaaagcttaaacgctcagcttgacgggctgtatgaggaaatggttgaaatcaggcgtcaccttcacatgaatcccgagccatcctttaaggagaaaaaaacaccggcgttcatcgcctcattttatgaaaagctcggcgttcccatccggacgaatgtcgggggaaacggtgtcacagcctatattgaaggcggtgaaccgggaccggtcgtggcactcagagctgattttgacgctttgccgatacaggatgaaaaagatgtgccctatgcttcacaaattcccggcgtcatgcacgcctgcgggcatgacggccatacggcggctctgctcgcggtcggaaaagtactgtactgcaaccgggaaaaactgaaagggtcatttgtgatgatccaccagcacgccgaggaattatctcccggcggagcaaaagcaatgattgaggatgggtgcctcgagcatgtcgatgccattttcggcactcacctttgggcgactgaacccgtcgggacggtcttatgccgcccgggcgcagtaatggccgccgctgacggctttacgattaaagtcatcggcaaaggcggccacggcgcgattcctcacgatacgaaggacgccgttttaatcggctcacaaatcatcacggctcttcagcatatcgtcagccggcgggtaaatccggtgcagccggccgtcatctcagccggctcgttcaccgctgaaaatccgtttaatgcgattgccgatcaggcagtcatatcaggcaccgtccgctcgtttgacgaaagtgtgcgcagcctgctcgaagcagaaatagaagccgtcgtaaaaggaatctgttccatgcactccgcttcctatgaatatcgtttcaagcgcggttatcccgccgtcgttaatcatcctgaggaagcggcgcacgcggcggcagccgcagcggaaacagacggcgtcacgaaggtcattgaaggagagccgcagatggccggagaggatttttcctattatctgcagcatacaaaaggcgcatttttctttacgggcgccgctttagaaaacccggaaaccatttatcctcatcatcatccgaaatttgattttaatgaaaaagcgatgctgacggccgccaaagtgcttatcggcgccgcggtgagctacccccgatagggcataaaaaacagccggtacattacgtaccggctgctgtgattcttaaatgaaaaacgtgccttgccgtctcaccgagctgtgacagcagtttataattggccgctccgcccacggcggctccgacgaccggcaaaagctgaaacaatttcaccacgtccagataatcgcggtattcctgctgaaaaactctccaatcgacatcatgctttttcgaatcccactgttcaatcattgagtatatgcgtttccgctgttcaccgcttgagaaagccagctgaaaaataaacagcaaaaacaatcgttcatccctgtctttcacatcatagccgtaaatagaggcaagatcgaacagacatttcattttaatggataacagcaaaggaaaatcagccatccctaaaaaaattccgccggcccccgtaccgatcccttcggctgccgcgaccttttggtacgatgcgatggtttgtctggcgagggcatctttttcagcaagcgtcataccgtttgtatcccgcttgcctttcaccagatttgaacccgccattgttgcttcggtcatttttttaatgctttctgtgatgacggcatgaattttatcgggaatccgctcatttattttcgcctgcattcctttagaaaaacgttcaagcatggaatctttgcgcaaaaaacgcactttccattgcagtgcttcctgtatcagctgctgatcgtcggtcatctgtgtctccttctttcattgaggtttcaaaaacccgattgattacagcttgccgtactttttcaatcttccgcccatatacgaaggcatgatcacaaaaatcagaacggctgaagcaacagccgcatacagcgccccgctgactcccgcggcataggctgacgctgcacagaacagcagcgcctgcacggttaatgccgatttcatcagcgaaaagaaactttgcagcttcgctttctgattgaccgggtaaagctcctgcagagaaagatgatgaaaatgcccgaacagcggcagaagctgtattcccgtaataaagacggtaaatacggttaacgccgccgttatccacggattggcggaaacgagcataataatcaggataaaaataatcgtgagcctgacctgaatgcctagataatcatttgaacgcagaaaggcccgcgcatacatataggagaacgttttccgctgttcgaacggaatcattctgagcaaaaagtcgagatacgcccggcgttttgcctgttttttcaggtgaggcacatcggtaaacagattggcgattctgtaaaaccgctgcttccttcttaattcatattcaatatgggcttcccattttaatgatttatgttttgcggccgatgtgaaatacacataaaggccggccatcacaatgtagacggcggcagcgtacacataaaacgactgtaagacgaagtataaaagcagcatattgcagataaagcgtatgaccgcatccatcattttcatgcttctgtcattcataaacgtcatccgccactccatggcctgattccacgcttttaccgccagcatctgaataaatacggcggcatacgacgcaagcgacgcccccggacttacagcgaaaaacagaggcatgcatacaagcgacagagcaataagcggaaacagctgtgacagatagctgtacttaaatgaatgcttaaagtatgtccccattttcggttcaagcggcagcagaaacacgaggtccgcttcctttaacagcgtccggacgtatgaaccggtcagcacaaatgaaaagagcaccgccatcacccaaaatgacggaaaatgaacgggaatgtctttgacccacttgctgtaccagcttgccgcgccggcaataaaaaagatcagcacaatgacgagatgatcattgagcatatatttcatatacattctggtttcctttatatgctcttcaagccgggactgccaaatcgtagacatattattcatggccggcgtcttccttcgtcagttcgatatacaagtcatcaagagctgcgtctttcatgccgaactgctctctcagttcttccagtgtgccgcttgcccgcacttcgccgttatgtaaaataatgaaagcgtcacagtagcgctctgccgtagccaggatatgcgttgacatcagcacgcttgatccggcttttttcgcggcgtccatccgctccagcaatgcattgatcgcaagcgggtcaaggccgagaaacggctcgtcaatgatataaagcgaaggctccgcgagaaacgcgcacatgatcatgactttctgtttcatccctttggaaaagtgagcgggaaaccatttcagccttttttccattctgaattctttcagaagcggaggaagccttttttcaagcgtttctttggaaaggccgtacgccatggccgtcagctccagatgctctttgagcgtcagttcttcatacagcaccggcgtttcggggatgtacgtaaattgcgagcggtagctttccttatcctccgaaaacgtcttgccgttcagctcgatcgagcctttatgcgggtccattaacccgataatatgccggatcgtcgtgcttttgcccgcgccgtttaatccgatgagtccgacaatctggttcggctcaagggtgaatgaaacattttttaagaccgggtttctcgtataaccgccggttaagtcttttaccgatagcagagacataatttctccccttctgattcgtttttcttcatagtaccaaaaataaagtctgatttgaaacgattccctttttttctcacgtgaaaagtgtgcatagttatcgttttggcggacatcataatgtatgtagaaggaaacagctttaatcaactgaaaatgaggtgtttataaaagacgtcttagaacagttggatgaaaatcaacatgtcctgtgcttacaatttcttcacacactgctttgatgatgttcttcattcatgatgaaataatcaaatgaggtgtttgtcccaggaatgattaagcagacccataagtcttcattttaaaaacaaatgaggtgcttacaaaaggcatattcaattttctgtgataaagctcgtacttctgcatcagggtgaacgcgcagccgttcatcctgttttttgttttggccgtttttgtggtacgatgagaatatacatatatttcttttcagggaggaaacccatctatgcacaaagcggacgattgtattttctgcaaaatcattgccggtgacattccgtcttcaaaagtatacgaaaatgaacacgtcgtggcgtttcttgatatcagccaggtcacaaaaggccatacgctcgtgattccgaaaacacatatcgaaaacgtgtacgagtttacgcctgagctttctaaagaatattttgaagcggtgccgaaaatcgcacgcgccatccgcgatgaattcgagccgatcgggctgaatattctcaataacaacggtgaaaaagcgggccaatcggtgttccattttcacatgcatatcattccgcgttacggaaaaggcgacggtttcggggctgtctggaagacccacgccgaagactatacgcctgacgatcttcaggagatagcttcaaccgtcagaaaacggcttgcctcatcttaaagatgaggtttttttgcgtccggaaacacaaaaaacataaattatatttttttatatcaaaaaaatcaaaaaattgtgataggataattgtattatttcttacactaaagcggaaaacagggagagatcgtaaacatggaacgtacaacgaatttcaatgcaggacccgcagcccttccactggatgtgctgcaaaaagcacaaaaagaatttgtcaacttcaatgataccggcatgtccgtcatggagctgtcccaccggagcaaagaatatgacgcggtgcaccaaaaagccaaaagccttctgaaagaactgatggatattcccgacgattatgatattttatttcttcaaggcggcgcaagccttcaattctccatgctgccgatgaactttttaacgccggaaaaaacggcgcacttcatcgtaacgggcgcatggtctgaaaaagcactcgccgaggcgaaactgttcggaaacacatccgtcacggcatcaagcgcagattcaaaccacaaccacataccggaagcgggcctctcaggaatcaaagacggcgcctacctgcatattacgtcaaacaacacgattttcggaacgcagtggaaagagttcccgaattcaccaatcccgctcgtagccgacatgtcaagcgacatcctgagcagaaaaattgatgtcaaaacgtttgatgtcatctatggcggagcccagaaaaacctcggtccgtccggcgtcacggtcgtcatcatgaaaaaatcatggcttgaaaacgaaaacgccaacgtccctaaaatgttgaaatactccacccatacaaaagccgattcactttataatacgccgcctacatttgcgatttatatgctgagcctcgtccttgaatggctggctgaaaacggaggtgtcgaagcggctgaacggcgcaatcaggaaaaggccgacatcctgtacggcacaatcgacgcaagcggcgggttttacgcggggcatgccgcaaaagacagccgttctcacatgaacgtcacgttcaccctccgcgacagcagtctcacgaaaaaattcgttgaagaagcgaaagcggctaaaatgaccggactcggaggccaccgctcagtcggaggctgcagggcgtctatctacaacgccgtcagcctggctgattgtgaaaaactggctcagtttatgagaaagttccagcaggaaaacgaataaatttcttctaacataacggttcctttgatatactgtttgcatatcaatttttccggccatcgcaataaatgacgagcatattattggatggcgaaaaagcttagcagaggagagcttagtatgaaaacaaaagaattagtcattatggccctgtttgcggcaatcggagcggtgcttcattccattatgccgccggtattattcggaatgaaacccgatatgatgcttgtgatgatgtttatgggtattctgttattcccccgtgtgcagaacgtgctgatgatcgggattgtaacgggaatcatttccgcactcacgacatcttttccgggcggacagcttccgaatatcattgaaaaaccggtaacggcgtttctgtttctcgcgctggcgcttttggtgaaaaagagcgtgaaaacagcgcccgccgccgtcattacgatagccggcaccttcatctccggtttgctctttttggcgctggcccttctgattgtcggcctgccgggcggattcaccgcattggtgctcgcggtcgtccttccggcggctgcgctgaatacgatcgccattatcattatgcatccgattgtgcagacgatcttaaaacggtccaatatgattgaaacggtgaaataaccgcataccgaaacctcttccggccggaagaggttttttaatgtgtttcagcatgttttatacgagaagttttgtgaaaaaaataaggaacaatgcgagggcggttcctgctgagcagacgatggccttttggcggacgacccgcttcggcggataagaagcggcctggccgagcagtttcaggtaataaacggcgcccgccgcaaagacaagagccatacaagataaaacaatcataaagacagacaaccttctccctccttttcccttaaaaaatatgctaaaataaagcaagctatgtatagaagtttattcttctgaacaaaaatgataaaagttatgagaaaaaaaacggggtgatttcaaatggctgacggacgttcccttttaacaggccttttcgtaggcggattgatcggaggcgcagcggtgttactctcggctccttcatccggaaaagagctgcggggcaaaatcaaagagaattgcaattcaattgaggacacaatcaaacggttaaaaaaagacggaatggcgcttaaggaccagcttgtccaaacggcgaaagaaagcgcagaagtcattaaagacgtaggcggagagcttcagaccagcattaaaaggtggcaggaggaaatcaaaccgcaccagcaggatctccagaaggaaatcgctgatattgaagagaaaatcagacagctggagaaaaccttacaaaactaatatcctatacaaccaaaaaaagtgcggacatattgcgttccgcacttttttttgcggtttaaagcctttcccagcaacggatcaagaatttattataaaattcttaaattttcatctttattaatctttattttattggcataatagaggaaaagaaaatgtgaagcaggtgatctgtattgaatcgtgttgaaccgccttacgatctaaaagaagctttaatctatacccaaaaaatggcgcagctgtccaaagcgctctggaaatctatcgagaaagactggcagaattggctgaagccgtacgaccttaatattaatgagcatcatatattatggattgcctatcagcttaaaggagcttctatttcagaaatcgccaaattcggcgttatgcacgtatcaactgcatttaacttttcaaaaaagcttgaagaacggggatatctgaaattttccaagcggctgaatgataaacggaacacgtacattcagttaacagaagaaggggaaaatgtattcgaaagcctgcttgaggagtttgatccgtcgagaaacgctgtgtttaaaggctcacagccgatctaccacttattcgggaagtttcctgaggttgaagaattaacctgtgtcatccgccacatttacggcgaagattttatggagatattcgagaaatcattgacaaacataaacaatgattttgatagtgaagacggaaggctgaagaaaaaaacggacgaatcggctgtccatgaaacggctgaagagctggaaccgatcaacagttaatcaaagtgcttcataatctcaataaattcttccatcagcgctgtataaagcccctgctcatacagagcaaaaatcgtttcatgaacatctaatttttcgttcagctgtcccgcaaaaagcgcaaggagcttgtcaaacgtcacaaagccttgcgctttttgcgactccagctcgtcctccaattcgcggcagatccgcccgacctcttctccttcttcttcggtcagccctttttcaatcatcatcgcataaaaagggtacttatccatatccaccgttttcaccagcaattgtatgtaatattctaaacgcccgatacgctgatccattgaatccatccgtttcacttctttctatctttaatcttattttagctgataatgaatggagaagaaaggttaaaccgtacatttccatgtttcaccgagctcttctgttcttctctttccaggtttatttttttctttaaaaaaggattgattttttctcctgaagagagtaaattattttgagattgtattccatctttgtacggaaggatgactctgatgaattgctggaaaaccattaatctgatcaaagattatggtgcggttcgtttattattgactgctgtaggttttatgatcctgttttttatatgcaacttcttggcattcgggctgctgcgtccgaatatcagtttaagtgacgggcacgtgtttgctttttgtgttctgctcgttgttactttatttgtacataaagtcatacatgtcctgccgatgatctgtaaaaaaagaaaaaaggaaatgaaaatgtacttcttgcggatgccgacatggaaaggcataccgaaaacgacgatgctgatttcaacgatcagcccgtttttattcattacgccgttattgttttatgccggactggcatttccgagacacgctcattacttttatatgatttcgagcatccatgcggggtattgcctgcctgatcttctgtttgccctgcatctggtcaaagcgcccaaatcatgtctgattgaccaggaatccgacggttttgatattttagtaaaaaaagtgccggagtcttgatgtcccgctgatttttcaggttacattctatcttttttaataaatatttggtaatgtaatatgggagcagttcagagagagggggaatctcccatcattttattctattttatcgtggctgccctgtttattctttatttcataaacaggctcacaaatacattatgccttgtcagagagattcctgaagaccggcaggataaggtattccgttttattaatgtatctattttaattttactgatctcttcattcgtcgagatctcctttactgtgtaaacaggcaaaaaaatatggctgacggaggtctgacccccgacagccatatttttttcttaataaagccaagaagcgccgatgatgatcaataagatgaacagaacaaccaataatgcaaaaccgcctgcaaatacttcacccatctccaaaagcacctcctacaaaacgttttatttttccaattacatcatatgcaatttactactgaaacgattaggcgcccgggtaagaaaacggaccgcttttagaaaaagcgatccgtttcgcttaacaaatgtaagctgcacctacgatgataagcaatatgaacagtactacgagcagtgcgaaaccgtttgaatatcctccgcccatggttcattacctccttttcatgatcaatatatttgtatgtatcaggaaaaagtttgactagacgaatgccctttatttaaaatctttttacagaaagccacaatatgttatgatacgcatatgcaatttaatttggatgattaggagtgtttaaaggaatgaagaaaatcgcgatagcagctattacggcaacgagcgtcctggctctcagcgcttgcagcagcggcgacaatgacgtgattgccaagacggatgccggaaatgtaacaaaaggcgagctctacacgaacatgaaaaaaaccgcgggcgcaagtgtgctgacacagctcgtacaagaaaaagtattagcaaaaaaatacaaagtatcggataaagaaatcgataccaagctgaaagagtacaaaacgcagctcggcgatcagtacagcgcccttaaacagcagtacggcgaagattacctgaaagatcaggtgaagtacgaactgcttgcacaaaaagcggcgaaagacaacatcaaagtgactgactccgatacgaaagaatattacgacggcttaaaaggtaaaatccgcgcgagccacatccttgtcactgacaaaaagacagctgacgaagtggagaaaaagctgaaaaaaggcgagaagtttgaaacgcttgcgaaagaatattcaactgacaactcaaaagacaacggcggcgaccttggctggttcgataaaaagtcaatggatgaaacattcagcaaagctgcattcggcctgaaagtcggacaagtcagcgatccggtcaaaacaaaattcggttatcatatcatcaaaaagacagaagaacgcggcaaatatgatgacatgaaaaaagaactgaaagaagaagttcttaaacagaaattaaacgacaactcagctgtacaggcggcaattcaaaaagtcatgaaaaaagctgacgtaaaagtggaagacaaagacttaaaagacacgtttaacacttcaacttcttctgaatctaaataaaaaaactgtgcgggctctcggcgagccgcacagtttttttatgcgatcgaatgattggagttttcttccgcatccccgttttcacttgcgggcgccgccatacggcgttcgcgttcctgttccatccgttcaatatacacccttccttctttttcaataaacgactgatccagcttttcctcttctttagctgttgtgaaaagcttataagcgctgaaaataattccgataatgcaaaggtatacccaccaaggaaaaaatagcacgtcggtttcctcccttttttacccagagtctttattctaagctatgcttgataaagacaagttatgagagctgaacgtaaaaaagaccgatcatagagaatcggtcttttttatcttattggtggaaagtcggtttgtagaaagaacggttttcaagcgcaaatacacgctctgtgtattcgcccggcttcacccgttccagcgctctgtccatcatgatcatttttgcatccagattgtcaatgtagtgcagaatttccgcttctttcaccatcggcggtttcgggcttccccattccgcttttccgtgatggcttaaaatcaaatgcttcagaatcagcacttcttcagcgtcaatctgaagctcttcggctgcttttgaaagctctgtcaccatgatcgaaatgtgcccgagcagattcccttccacggtgtacgttgtggagacggggcctgaaagctcttttactttgccgagatcatgcagaatgactccggcataaagtaaatcccggtcaagagacggatacagatcggctatcgcttttgccaggttcagcatggacactacatgatacgcgagccctgaaacgaactcatggtggtttttagccgccgccgggtaatccataaactcagccgcatattttttgaccagatgtcttgtgatccgctggatgtttggatttttcatttcaaaaatgtattgagtgacggtttccatcatttcatttttcggaatcggcgccgtttccagaaaatcatcaatgctgacattttcgttctcgccggccggccggatgtttctcagcttaagctggtttcgtccgcgatagtgatggacatctccgatcaccttcacgatcgtctgcgccgcgtacgttacttcatcagtcggcttggcatcccacagcttcgcttcgatatctcccgattggtcctgcagcattaacgtcaggaatggttttccgttgcttgcgattcccttagtcgaagatttaatcagaaagtattgatcgacctgctcgccgacctcgtgcagcataataccttttgccattctattaaaagctccctccatatcttacataataccagtatagcacatacctcttttttgaaaataaactcttttatgacaggagccgcatgacttgtccgctgtgaaaagaccggctgacatgctcatggcaggtgaaataaagtatctgccgcccgccttctgaaagctgattcagcacatcaaacagccgctgcagccgctgcctgtcaaaatggacaaaactgtcatcaagtaaaaacggcagtgataccgcagattccctctctgacgcaagggcaaaacgaatcgccgcataaagctgctcgcatgccgcctgtgacagttcgcctgcagaaaacaccgttccgtctttccgcatgaccataatggaatcatcagcctcggaaaaatacaatttgtgatagcgcccgtccgtaagcggtccgtataatgcaccggcggtttctaacagacggggaagcgtcacttttttatgccgctccattttttccctgataatgtgtctgaccgtctgtaatgcggcccactctttagcggtttttttcacgcgctccttctgcatttctgtctgctgttttaaatcggatacaagccccgaggactccagctgctcttgcttcaccgttaataaagcggtttgctcacggagctgggcgcttttttcctcaagtgtttttttctctgtttccttctgaacgactgtatgttcaagttcggacactgtgcggctcatgtacggctccagctgttttccgcctatgccggacaagtgcgttttgatttcgcgcagctgccgctctgtttcccggcggctttcattcagcctggcgagttcacaaaagtgttcgcggttttttgcgcctgccgccatgaaaagctgtttgacctgctgttcgtagtaatgaacttcttcgtttaattcacgcatttgctcttgtgcatgcagcagatccgtttcgagcgcctgctttcgttttgcttcctcacgggccctttccgcctgcgccagcaaaacgtgcagtctttctcttacggacagctcccttccgtctgaaggactcagctttttgacccggtcctcaaatgctctttgcagcttttgcagccggcccgcttcaatggtcagctcatgcttgttaaggatttcttttttgacatctttcatcacatgatatgcgtcaagaagatgggaaggacttcctgaaaaccccagttcattcataaaaagttccgcctgtttttcagacggcgccatttcggcctcccattcttcatattggcggatgactctttcatatgccgcttctttctgttcaagcacggcttgatccgcaatcagctgctgccggtgccggccgtcacgccaaagctcttcctgcagaaaatcagccgcttctttagagatcgccggcttctttttcttgtgtccgggccctcctctttctgacggcagcggtttttgcatgccggacagcatatacagcagcagagcaccggtaaaaaaggcggcgggcagccattcctttaacatagcgaaaatcgcaatgaacagaatgcccgcaccgagaaagagctttttttgtttggcgcgctgtttttccagctgctgaacatgtgcctgccattcgtttccttctgtatcagccgtttgcttatatgattgtaaagcggcttctttttctttcctgacagcggggtccaaaatgttttccgccgtcaaggcatgttttcgttcggcttcttccagctccagccgcgcttgttcgaaaatcgcatcaagctgtgtctttctttctcttgcctgtccggcgctctgcacggcttcctgcagccgccattcatattcataatcggtgttcagtgaaagaatgccgtcttcctcatgtcttccgagctgctgcaatcctgacgaaacgcgggcagatgtctgccggatctgtgattggatggctgcaagctgttcgccgcgcgattcatacatatgctgctcgccggaaagctcctgcagctgccgctctttttgcagcaagtcctcatttggagcgagcagatcagcctgccgcctgagttcagccgcttttgcccgaagcccctcaagacgggccgctttcggatggagatgcgattcgtatttttcaagctgatgcattccatccttcgggaattgcttcaatgcttccggataagaagaaagttcgctttccaaggctgtttttttgtctgcgagcggctttgcttctatcgccgattttactgttttgatttcttcagttatgtctttcaatcgtgcttcggcatcctgcaaacggccgccggcgctttttttctcttccagaaggctgtgatagcccgcttccgcagcttccgcctgtttcagctgggcgctgagccgctttaatgtatccaactcctgatttaagcgggggttccgcccgttcggcttatacatcctgtcaagttcttttgccagtcgcccgtcaagctttgccgccgcttctgacccgaataagctcgaatacaggagaaactcgccgattttgtcccggttaaaagcttgaatctcctgcagtccgaatacatcgaacgaatagatcgcttcgtacagcgcccgatctgtatcggaaagaagctgtttgagacattctccgtccttgatttcgcctgaagccgtatacactctgactttttcggcagcgccttttgtccgttcgattttgacagcgccgtgatcgccatgcttcaattccacagtgccgccgtaaaccccgccgtttttcggttcgtatttttttgatttcggaaaaccgaacagcacgcttttgataaaggacatcaatgtcgttttacccgcttcatttaacccgtagatcacttgcacgggagaatctgacaactgaaaacttcggtcggaaaattttccgtattggtaaatatgcatcgccgttattttcatcgctgaagctccttcatttggcgtcttaaaacggcttgagcctgccgcttaatatccagtatctcttcatctgtaaatgaagccatctgacgccggtatacgggatgacgctcaagggcttcaaatacaccgctcatgtccgcgcattgttctatgtcctgaaggagccctttaaaaaacggatcgggcggcacggtgtctgtttcatccgtccgatcctcaagcgcaagcggccagacgaaacattcctcttcggcctcttcctcctgtaaagcggaaagaagctcctccgcgatgcctgcgggcgcctccgtccaaaagcggggcgctgcgccgcgaagcaccagcctgacacatgccgggcggcccgccgcgcgcaagccggagaatgtatccgatgcggttttcagaagtgaagtcatatgttcagcttcggagatatcaagatcaatttcctcccataacacatcatgcgcttctttgaattcccaagacatctcaccgtttgccgcccggacgagataatatcccttaggcccggtttcttttaaatgccgggcttgaatattcccggggtaaatggcggcgggatgccgggcggacagaacctgccgtttatgaatgtgtccgagcgcccagtaatccatgccgcttttttcaaggtcttctttcgtaaacgggcagtacgggtcatgcccttccgctcctgataacatgccgtggagcatgccgatatgataaggcgcgccggtcactttccggtaacgggccgcctgattgaccgttacgcttctgtcctgatagctgcatccgtatatgcttgccgcaagctctccgtttttaaagaaagatttttcctccggtgtatccgaggtgaagatatgtacattttccggccattcaatcggcgtccacttaccgcccaaatgatcatggttgccgaatatgacgaacacttggatatccgcttcctgtaatctcgtaaactgttttctcaaaaacagctgggcttttaaacttctgttggcttcgtcaaacagatcccccgaaagcagcacgaaatctgcctgctcccggagtgccccgtccgtcagacggcggacgctgtgaaatgtgctttctttaatacgcgcatataccggttcaggcagattcgaaatgccgtaaaacgggctgtccagatgcaggtcagcggcatgaataaacgtcagatcagtcatctcgccctcccctttctgcaaattgaattacccttattttagcaccgtttttatacgaatgcacgttctgcaaaataaaaaaacagcccggctgttccgggctgtttctcttattttttggagatgcgcagcgcttgtttaatcgctttgaatccgctggcgtttccgtaaatcaatacgccgcctttgtaaattttcgcgccgaccgccgcaaagatcacgatagtgaccagtgtcagggcgattccggccgcagcctgccaaaacgggatatcgagcatcccgacgcgtaaaaacataatcatcggcgtgaaaaacggaatgtaagatgtaacggtaataaaaccggcgtcaggattgccgatgccgaacatggcgatcataaaacctgccacgactaaaaaaaccatcggctgaatcgtctgctgtacgtcctctatccggctgacaacactgccgagaaacgcggcaagcgtcgcgtaaagaaaatagccgagcaaatagaaaatgacggcatagactatcgtcgagactggaacatccgtaaagttgagaaatgcactgatcggcgacgacgcctcattatgagggttcagcttcagtgagagataacccgccgcaatcagcaccccaaactgtgtgatccccacgagcgcgataccgaacagtttggcaaacatctgctgaatcggcggcatgcttgaaattaaaatttccatgacccgtgacgatttttccgtcgccacttccatcgcaatcatgcttgcgtacatgataactgagaagtagatgacaaacagcatgatgtatacaagccccattacctgaccgagctcttcctcagatttcgcccctttttccagcgcgtctttgctgacttccggcggagtgtagaggctgctgactttttctgccgaaatgccgagcttggcggtttcgacagcggtttttgtctgggttaaagcctgcttgagcagtttatacgctgattcatcggaaatggtcagcgccttgtatgctcctgttatcgttcctttttgatcttgtctgatgataaacagtccgtcccattcaccgtctttgactcgctttacggcatctttttcggactccttcgtctccattgcctgcagatcattgtctgtatccgccgctttaagctgttttgcaaacgccgggtacagcccgcccgtttcatcaatcaccgcaatttgctgcttgccgtcatccgattgaaacacggatataatcgattgcaggttggtcaccgctaatactaataaaacggtaatggcggtcgaaataatgaatgactttgtcgcgattttgtttttatatgtatgaaacagcataatccaaaatttattcatatacggcccccaccttttctataaaaatatcatgcagtgacggctcttccaattcgaacttccgtataaaacctttcccttgcagcgcccggaaaatatcctgagaaaccggttcattcgcgacctgcagtctgatcccgtcatttgtttccttccatttcacgacaccttcatgcgtttttaaaaagctgaggtcatcatctgaatgaacggtgacattttttttgccgaaagaccgcttaatgtctttcagattgccttgaacgacgggttttcccttctggagaatgcacaaattctcacaaagttcttccacatgctccattcggtggcttgaaaaaacgatggaaacgccgctgtttttcaaagaaataaccgcttctttcagcagctcgacattcaccggatcaagaccgctgaaaggttcatcgagaatcagcagttcaggcttatgcaggacggccgaaatgaactggattttctgctggtttcctttagacagctcttcgactttcttattcttgtaatctgtaatgccgaaccgctcgagccatgtcatgagctctttttccgcctcttttttgcccattccttttaatctcgccaaatagacaagctggtcactcaccttcactttcggatacagcccccgctcttccgggagatagccgattttttcactgatggaataattgaccggctgccctttccaggtgatatgcccgtcagtcaggcttaaaagacctaaaatcatccgaaaggtcgtcgtttttcccgcgccgtttgcgccgagcagcccgaacatttccctttcaggtatttgcaggttcaaattgtcaacagcggtaaagctgccgaatgttttcgttacgttttcaattgtaagcacgaatccaactccttccttgacccattatatactaataatgggtaaaaattaatggaggattttaaattctttatcagaatatcattctataaagggggtgacatgatgggacaatatgtattgaccgcattccatgcgtcgggagaaacgctgctggatgaacggatcgaagcggataatgaggcggaggcgaaggccgccggagaggctttgttaaaggaaaaaaaacttgagaacagtactcatcgcttggtaaatgaagccggaaagctgattttattccacagataacagaagctttccggcttctgtattttaccggttaaattgcggcgtccgtttttctaaaaaggcgcggatgccctctttatgatcatccgtttttctcatattttcctgggcctttcgttcaagagacaaaacatcttttaaccggctgatatggaggctctgataaatagccttcgtttcaatcatcgctgacagcggcgcatgcagcaatcggtcgatatacggttgtgccccctccgcagggccgccgctgaacagcccgtcggcaagcttgagccgcaccgctttttcagccggcaatttttcaccgctccaaatcagttttttcgcttcgatctcaccgacgcgtctcattaataaataatggcctcctccgtcggggaccaatccgatgccgatgaaattcatcgcgagtcgggcgttttcttcagcgagcaccacatcggcgcacagcgcgaaactcagtccgagccccgccgcggctccgtggatggcggctatcacaatttttttcatatcatagagcgtcaacgtaatggattcgatcattttcatgagccgttcatattctcctgaatcatgatcagacgtcatcatctggatatcaccgcccgcagaaaatccccggccttccccccgcaagaggacgataagcgcttcgctgtcggctgccatcacgcatgcattttccaattcccggagcatttgttcattcagcgcgttgtaactgtcaggccggttcagcacaatctctgcgatctttcccttttcttcataacgaatatactgcatgtttacaccctccttgtatccgcttacatattttgttcaaatgatatattccttccgccgaagcgaaactcctttatttttcaaggtcaacagataccgaaaaatgcatatcatttgaaactgaacatacatttttatatagtgaaattgatatacaaaacaaaaggggggaaaacaccgataatgaaatatgtgatactcagcttgttactgagcttttttatggtgctgttccccccttcggatgtcgctcttccttcccaattggtgacagaaacagacagccatgtacaaatttcggtttacccgcaggaaacggagtcggcaaagacgccggttcaaaccaaaaccgctccgcaaggcctgtcaaaaggatacggtgcgttatcccggatgatctccctgttatctgtcaaacctcttgatcaattcattgattccacaatggaaaggacatgcgccattccgatacaataccagtcaaattacctccggcatcagacaatttctcattgccaatctgtatttacgatgtaaaaacagtatattccggagggattttttatgaatattaaagaaaacgatctgcccggcatcgggaaaaaattcgaaatcgaaacgagaaatcatgaaaaaatgacgatcatcattcatgatgacggcaggcgggaaatttacagatttgatgaccgcgaccctgatgagcttctggcaagcatttcacttgatgatgcggaagcaagacagattgccgcgattatcggcggtatggtgtataaaccgcaggcgcttgaatcgattgaaatggcgttcaacgatctgattatcgaatggtttaaagttgaaaaaggggcaaaagcggcagggcggacgctcggcgaactggatgtgcgtcagaactatgacgtgacggtcatcgccatcattaagcataaccggaaaaagcttttaaacccgggcgctgattcgctccttgaagcaaacgatacactcgtcctctcaggtgaaagaaagcatctgaaaaagctgatccaagacttcctctccagagacggagtgtgatctgtttatggaccatctcgtatttgaagtcggtacggcgttagttcttgtagccattgcgagtgtcatcgccaataaaattaaattctcgatcatccccttcctgatcattttaggaatgcttgtcgggccgcacgcgccccaagcgggcatcattgacttgacgtttattgaaagccgggaagtgattgaatttttcggacggatgggcgtcctgttcctcctcttttacctcgggcttgaattctcggtcggaaaattagtcaaatccggacgttcaatcgccgccggcggaacgatttatattctgattaatttcagtttagggctgatctacggctttatcacgggcttttcctttttggaagtgcttgtattggcaggcgtcatcacgatatcatcaagcgccattgtcgcaaaggtgcttgtcgacttaaagcgcacggccaatccggaaacggagctgattctcggcatcattatgtttgaggatatctttctggcggtttacttgtccgtcgtctccgggcttgttctgggagacgcgacgtctgtcggaggcgcgctgatgtcaatcgtgatcgctttcggatatatgctgctgtttttcattgccgcccgaaaattgccgcctctgctgaacaagctgcttgatatccgttcaaacgaggtatttgtcatcgtcattttcgccgcgctctttttcattgccggcttttccgaaacgattcatgtcgctgaagcgatcggcgcgctcttgctcggactcgtgttttcggagacggcccattctgacaggattgagcatcttgtcgtgccgttccgtgactttttcggggccatgtttttcttcagcttcggtctcagcattgatccgttttcactcggagatgcggtatggcttgccctcggcgccgttctgctgacgattgccggaaactttatcgccggcatgatcgccggacgccgggcggggctttctcataaagcatcgtctaatatcgggctgaccattgtgtcacgcggcgaattctccattatcgtcgcaaatctcggcatcgccggcggcctgtccgcttcacttaaacctttcgccgccttatatgttttgatactggccatcttcggccctttgctcacgaaagaatcgaagcggatatatctcctgttgaacagcgtgttcaaatggaagacgcctgaaaagaagccgcagaaatcataaaaaaaactgacctcttcataaggggtcagtttttttgagcgggaagaaattgctgaaaagccgtttttttattaatggagaaatgctctttccccagaatggtattgatgattttttggtttctgtaaacagacagcttcaaattcgtagcgcctgttccgtgagcatgatcaagattcgttaatgtgaaaaaatgatgccgcctgtcgtccttaaagataagacgggaatcggccgtcactttaaaccgtttctcatcctcccattcgatatcgggggcaattgccgtaaaccattccggaatatgaggtttaaagccggtcgccaatatcactttttctgaatcggccgtaaaggtttcatccatctgccattgatgaaagctcagtacgcagcgcccattttgcttttcaattttttcaagctccgccatcggctgaatatacacgtcaggcgaacctccgctgatcgatctgtgatacagggcatcgtaaatggcggcaagtgtgtcagaatcaatgccgtggcgcagtccgtccagctcagggagcgtgttcagccgttctttaaaaggcaggcggttaaaatattccacataatcaggtgtaaacatttcctgcccgagcttggcggtttccaattctcgaaatccggcggagcgtgtcacccattgcagccggctgcggcggtattgttcatcgtgcaataagtcagaaaagatctccgcggcgctctgtccggaaccgaccaccgtaattgattcggcgccggcgagctcgtctttccgaaacaaatattccgtgctgaccatcgtgtcctgacgcgcttcgtcagcaatctctgcgggaataagcggctcagaccccgtccccatgacgaaatgcttcgtttgatagacactgatgcttccgtcctcaatgttcttgacgctgacgtcataatgtccgccggcatttttcacaccgattacctctgagccgaaacggcatgatttgatttctgaagccgcccagctcaaatagtcgttaaattcccgtctcggaatatcaaattcattaaacgtataaaaccggtacagccggtcatgttcatggagaaagtttaaaaacgtgtagcggcttttcggatcggcgagcgtgaccaggtccgccagaaacgccacctgtaaatcggtccctttaattaatagaccgggatgccacgcaaattctttctttttatcgaaaaaaagagcatctgttccgggtatatcctctaacaatgcggcaagccctaaattaaacggcccgattcccgctccaatgacatcatacatattatgcacctcttacgaataacagtctgatggtcttttcccgtttttacagacggttaaacataaaaaaaacggcacgctgattccgtgccgtttttgatattataatgcggatttgacgaacatctcatctaagtatttgattttctcttctgtataatgctcgaatcggtcattatatgatttcggatctttcggattggcgaagtgcgtgatttttccggtttccggatgaatgaatttgcttgccgcgccgcagccgataccgataatcgtctgcacttcttccataatcataatgttgtagatgctttcctgaccagggaaggagtagccgacattttcaaggtttccgagaatgtttttctgccggtacaagtagtacggcgtatagccgtgctcttttgtccagcggacggcgtcatccatcatgcgggacacttcctgtctgtcggcaactttatacttatgcttgtttctcgtcatttctgacgcccgtttaaaagaaagcgtatgaacggtcaaagattcaggcatcagcttttccgtttcctcaagactgtgcctgaactcagccgtcccttctcccggcaggccgatgatcaggtccatgttgatattattcatgccgtgtttgcgggaaagatggtatttttcgatggtttcttcaactgtatggtgtctgccgatggccttaagcgtttcgttttcataagattgcgggttgatgctgattctgtcaatcttatacttatttaaaacggcaagcttttcctccgtaatcgtgtcgggacggcccgcttcaacggtaatttccctgatatttgcgacatccggaaaagagcggaccatttcttcatataaaagatccatttcctcagcggtaatgcttgtcggcgtgccgccgccgaaataaatggtcgtcactttgatatcatgccgcttcagccattctccgattttctgcatttcatagtgaagcccccataaaaaggagccgactcttcccgcctgtccttgaatggcataagccggaaacgtgcagtaggcgcacttcgtcgggcagaacggaatgccgatataaatgctgacttcatctttgacccggtacagatcgggaaccgcagcgagctggcggtcgacaatctcctgcatcagattgattttttcatcatggatcagataatcttttttcagatcggcatgcgcctcttcttttgtcaggccgctctgcagctttttatgaagaagtttagtaggcctgatgccggttaagattccccatttttgtgtcatgcccgtatgcgattgaagaagatttaagtagacatatgacagcgtatttttcacctgtttaaatacttctttttcgttccatccggcaagaagcggtttcgtatgatgttccttttcgccggttcctttgatttctccggataccgacacgctgtctgcatcttgagaaatggcaagtgagatgacgagatcagagggttcctccgtttcgccgtatgcaagaacacactcttcaaaaaataaattcgcgatgttttgcagcggacgatgcagcctgtcatccgtgatgccgtctatttttatttgcaatgtgatcaccttatttttcagattcaaaactttctttagtgtacagaaagaacaggctaaaatcaatccgcgaaaaagccgcagaccggcgtttcgcgtctgcggctcttgattacggccttttcatatggaacttatcgagaaagcctttgcggtgctgcatgcggaaatattccttaatcatataggcgactccctgttcatcatttgaccttgtcacccagtccgcttttctttttaattcatttgaggcatttcccatcgcgacgccgagaccggccagctcgatcatcggcagatcatcttcctgatggccgatagctacaacctcttccattgaaagcccgagttcagcggcgaccatcgaaagtccgctttcttttgaaacccctttaggcacgatgttcagtttttctccgttgacgcggatcacatcgacggccgggaatgctttcattatcgtatccgttatatcagcctgcaggccatcttcggcatgcacttcaatgacgggcgctgaaaccggctcatcaaggagcaggtcacttaatgattcgacaaactgcaccggataaaaaatcgggtcagacggatgaatcatcgttttcccgaccagattggagttcactttcttcttgtttccgatcgaatatttttcgtgaagaagccggatattgcatggatagctttccagcacctgaacaatattaaacgtgtgatcttctgatattttcttttcaaaaaacggctcatctattttttcagaaatgtatgcgccgctgtgggtaatcaattttgcattcagctttaatattttcgccactttttgagcagagcgaaaatggcggtttgtgaccagtgtgacgtaaattccttttttcttgacgtattcgatggcatcctttgtcgtctgatgaagtttgccgttggagcgaagaagcgctccgtctatatttaacgccagcatttgttttgacacagagaagtccccctccttgatgactgtacttgtcattaggatatgaccctgtctctttgtttagaacaaccttttctccgcagcaaaaaagcctgcctcaagcagactttgaactgtcgttttgttgggatacgatcgatttgctgccttctccccaatgtgtatttctatttacgaaatatatcaggaaccccttatttgaccgttgatgcgctcgtttcacttactctctgttgctaccccttaacataccaggcagtataggcgaccgtatccttagatcatctgtaagtgtaggcgctttcagagttattatctcaattatattgttaaaaaacaagggtttttttaactaaaaaaatcagagggaatatctgtgctgaatgtatgataaagttgaaagggaacatacattctcatataataaaagaaaaaaagcggtgactgtcatgtctctattaaaagatatttataacgaagaatttgcagaagcacttctgaacagaatcaaatcggcgtatccggcttttgagcgggacaagtgccgggcgctgatgtttcaggaagattggcccggactgacgttaaaacagcggatgcgccggatcacagactctttatatgaaacactgccgaaggattacatacgggcgcttaacgtcttatatgagacagctccccgcttctcagggctcgccgggattatttttcccgattatgtccaacagtacggaacggatcactgggacgaatccatgaaggcgcttcagtatttcactcgtttttccacttccgaatttgcggtccgcccgtatatcaggcttgaccgggagcggatgttcaaagagttcctttcctggacggagcatccggacgaacatgtcagaaggcttgccagcgaaggctcaagaccgcgcctcccatggggaatctccattccggctcttcttgacgatccttctccgattctccctgttctggaccgcttgatgcaggatgactcgttatatgtcagaaaaagcgtggcgaataacctgaatgacatctccaaaacacatccggatcttctgctacagatcgcagccgagcggttcggaagctgtccgcacacgaactggattttgaagcacgcctgcaggacactgttaaaaagaggagacaaacaggcgcttgcggttttcgggtttgaagacgcctcccggatttcattggaacgttttacactgaattcggaaacggccgccatcggaacaagcatacatttttcttttcagatccgctcatccgcccggcaaaaagtcagggttgaatacgcgattgattttgtaaagaaaagggggcaccgcagccgcaaggtgtttaagatgtcggagtccgccatggataacggggacgtaaaaaccttcagcaaacatcattcccttaaagatttaaccacccgcaagcattatcggggaattcacactctgtctatcatcattaacggaacggtaaaaggttcgcttgatttttctgttgaataaaaaaacccctccatttcatagatggaggggtttggagcttattccgggctgccgtaaagctcttcaagaggtttcataatgattttgtttaactcgccgatcagcatgctcatgcgctgttccgcttccatcagctgagaaatcaattcatgctgctgtacgagagcaaccgttttttgtgcctgctctacctcttcctgagtgatttcttcacctgacatctgtttctgctgcagctgcagctgtacattgcggaagttatcaaacatgcgttttgccgattcatctgcgtttacttgatcataaagccctctcagacggctgtattcatcactgtttcgcaaagctttttcaagatcatatgctgcatcataaaaatgaactgccatagtaaccgctcctttcttcctttcggacataccactccactataacagactgcggagcgactttcatcatcggcgtatgttttccttagaaaagaatgacaaacaaagcctgaattgctccgattatcccgccgagcagaccgcctaaatacgttatcatcttaaattctctcttggaaatcgacagcaccatttcctccagccgttcaacaggaaactgatcaacctgctctttgaccacttcctcaagacgcagccgtttcagcacatcctccaaatgagcggcaatactgccgagtgccgcatcaagcagcttcggcgcgtacgttcccgtaatctccccttcataacgggaaatgatgtcaccgagccggcattcgaaaaagggcgcggtttgaagtgcggccaaagcccgctttttcatgctgaacagcagatctttcgcattccacttttcatcggcctcataaagtgtataagatttgagcttgccccattcttgagaaagcagatcagccagaagctttttcgtttcctcattgcgcaaaaactttaacagctcaggcagcacacggtctgccaagcttgaattgccgaggaacatctgcaccatgctgccgagcatcccccgggaattcaaaaagtcgtcaatcatatttccgagcctgtctttcccttcttcgctctcaaaataatcaatgctccgcttcagaatataatctgcggccaacgggactttttcatccagcttttcctgaagctcatcaggaagccagtcttttatggcgcggtgctcatatttccggtacaggtccgaaagcttttcatcggtaaaacggtcaatccaggcatccgtcttttcctgcggattccggatgcccgcggcggccaaagcttcgtgcaccgtcatctcggaagcggccattttttgtgtgaattgttcggcgaaaagaagcgcctggtttttaacggtatctgataaaagccgcttttttattccttccggggttaaaaggtggttcgtcaccatgagccccatttgttttgccaattcatcccgccttttcgggatcagccccggcgtaaacggaatccgttttccgaacaggtaatacggccggtacggacgaaataacatctgaatggcaagatgattcgtcaccgcgccgatcgcggctccgatcacaatcataaatagaaacgttcctgctatgcccattccttttcttctgcctccatcttatgttctattttcttgatgatatatctattcgtattatagaggctggcgtgcatgcgggcaaatgaagaacctgaattgttgtttgtgaggaataaggcaagatgctgtttcgtactctttacagtagatcatcttttatgatgcgcttagcatatttattggatggaagggccgttccatcagcggctttttgaataaagggggagtaataatatgacaacactcggttttatgtctgtatcccgccggcacgaagaagattacgccggggaattggctgaaagagcgcctcaatataatgtgcgcttagcccgctttacaccgtttgatatttttccggattctttgcgcgtgaaagcgctcgtctatcacccgcaaagcggaaagtggaacgaaacggaaatcgatattcccgaatatatttacgaccgctgtttttacggaaaatccgctgaagcgcaaaaagccaaaccgatcgtcgaatggctgaaaaaatatcggaaaacggaatttatcggccgggggcttcctgataaatggacggtcacggatgcgctccaaaagcatcatctgatcagcccctatattcctgaaacggccgaagtaagccgatatgaacaggtgcaatcatacttagccaaggaaaaagcatgtatacttaagcccgctttcggcgcgggaggcagaggcatcatcctgcttgaaacaggcaaaaaatcaattacggccacttactatatcggaaaaaacaaacaaacaaaatcattttccaatcacgtgtcttttaagtcttggtgcaaaaaagtgttgcagcaccgctatttgcttcaatcctacttaaatatccaggataaagaacggcatccgtgcgacatccgcattttcatgcgcaaaacggagtcaggcgtttgggaaacggtcggaaaagcggtcagaaggggctatcagaacggtcttttatctcatttgcccggaggatcagaaccgattaagtttgacacgtggtttgaggaaattccgagaaagcagcaggccgttttattggatgatgtcttttcgatcacccaatccgtcccttatttccttgatgaacggttcggaccgctgtttgagctggggctcgatatttgttatgccaaagacggacgcatctggcttttggatgtcaattcaaagccgggacggaaagctattttaagcgtggctccggaggcgaaagaggatttgtatacgggtccgctgagacgcttccgcgaacttcagtcacaggaaagcaggaaaggagtattaccgcgtgaatcataaagggatgattgtcggcatcgataaaaaaagcaaaaatacgctgtttctcccctcctccatgaaacgggaagggcttttatccgctgccttcgggaccaaggttgttaaatgccgtgtagccttttctcaatcacttgaaaaaagcgcgctcctttctgaagatttgtttgaggagctgttgataccgtataaaagccgggctgactttctcatacacggccaaacggtgcacatcggaccgctgatcggcgttttcacagccgggttcacatcatcgccgtcccgcccgttaagagaccgtacagccttcttttccaagatgctctcacttcatgaacaggcgaacggatattgtttcgttttcggggctcatcagatcaactgggaagaaggcaccgtccaagcgctgatttataaagaaaacagctggaaacggacggccgtcccgcttccgaatgtcgtatatgacaggctcccgagccgaaaaacggaaggagttccgcttttacagcagacaaaacagaggctgatgaatgactatcagattccgtggtttaatccgcaattctttaataaatgggacattcataagcttctggaaaaaaacagcctcaccgcttcacttctgccaaaatctgtcctgcacccgaatgcagaagcgttagagacgttatgcaacacatttgacaccgtctatatcaaacctgcagacggcgcactcggaacggggatttacagggtggaaaaaacagatgccggcttatctgtcaaacacacgaatgaggaaaaaacggtggtgacggcagagtattcagatgcggcatccttcatgaaatcatttaaagaaaacaatgacccgtccgcatttttaattcagcaaggcattgacctgatccggctggatggacgccccgtcgatttcagggtgcacacgaataaaaacgccgagggaaaatggacagtgacggccatcgcggcaaaaatttccggtgaaaacagcatcacgacgcatctggcaaccggcggagaagtcaggacgttagctgaattatacggcgatccgcgcgagagagtcggcatgatgcggaaactttcaaaagccgccttggcggtcagccgcgtgttaaatgagcacattgaaggttttatcggcgaaatcggttttgacctcggcgtcgatcattcagggaaagtttggatgtttgaagccaattcccgccccgggcgcagcattttttcccatccgaagctgagatcggtcgattacctgacaaaacggagaaattttgaatacgcgtcctatttatcagaacggtccatcaccgccccggaaaaactttggcggtgaggctgtctttttttggttttacccgggacaggcacagaatgatgagctacaatgaacaagatcaacatttcccacaaggagcgtgaacgtcatgatttcgcacttcagctggaaaccgttattcaaaaaagagaaactgcccggatggcgaatttcattttactggcagggtacgcattacgaagggatttaccataagtccggtgacattgaatggggacacacacatccgggaaaagaagagccggctctcgtaaaagagctgcatgaattaatgctttatcacatatatgactgaaagctaaaagctcagccgcatcaggctgggcttttctttttccttccgctatttaccacccggttttccgaatgagatgccgtttgattcaccataatacgtagtacaaagcggcaaacagcattgggtgaagccgagctggcaatggttttcattccgagaatcatcggctggtgcaattccagcaaacccaaccatactacttaataaaggagatcatacaaatggcaaacaacaactcttcaaaccaactattagtacccggcgctgctcaagcaatcgaccaaatgaaatacgaaattgcttctgagttcggcgtaaaccttggcggagaaacaacttctcgtgcaaacggttctgtcggaggagaaatcacgaaacgtttagtatctttcgcacagcagaacatgggcggccaaggcgtacaataactcaataaatggcttacagaaggcgcgggataccgcgtcttcttttatgccgtcacccttttttcctatttcacataccctaggaaaaaaggagggaaaacatgtcattcattgcctcagtcaattgggagctgtttcagttcgtaagtgtttctttggtcaatgaatatgttgcccaccatttcccgtttattcacaggcattcttttccccgctgctttgaatgatataatgagcggcgaggaggttttttacatgaacatcgctttactcggagcaacgggaagagtcggacaggcttttataaaagaagcgcagaaacatggacacatggaaatattcgctcttgtcagatcagccggaacagtccttcccattcctgaaaaacagatcataacagggaatgcgaggcggcgggaagatgtaagccgattgatttccaaagcggacacagtcgtgagctgtctcggcacggacggtgacgataccctttcagccgctatgacccatataatagacggcatgaaacggcatcatgttcagcgtctgattacgatcggcaccgcgggtatccttcaatcacggcttatgcctgatcaataccgttttgaatcggcagaatcaaaacgaaaatcaacaagagccgcaaaggaacacgcccgcgtatacgagatgctgctggcagaggatcttgactggacgatcatctgccctacctaccttcctgacggagacgctgccggagtttaccggttcgaacaggatcgccttcctgaagacggcgccgaaatcacagtcggagacacggcgcattttctgtaccgcgagctgatcagcccgcagtttgtcagaaaacgggtaggactggcttactgaatgaaaaaagggcgaatctttttgattcaccctttccgattacaccgcggacttcgccgatcctttctgcaattcatacatttgatggtactgccccttttgcgccattaattcgtcatggcttcccttttcaatgatgcggcccttttccagcacgagaatctggtctgcgtgtctgatcgtggaaagccgatgggcgataataaatgtcgtgcgcccttcttgaacgacttgcagcgctttttgaataactgcttctgtttcggtgtcaatgtgcgccgtcgcctcatccaaaattaaaatggccggatcgaacacaagcgctcttgcaaaagaaatcagctgacgctggcctgaggacagtgtaccgcctttttcagtgacgggctctctgatgcccttcggcaaagattgcagaagacttgcggcgccgacttggcgaagcgcttcttccgcctgctccaaagaaatacgctgatcatcgagggtcacattggagccgatcgtgcccgagaaaagatacgggtcttgcagcacaatgcccatatgcgacctcagctcctgtcttgacatgccgtatatgctttttccgtccagcaggatatcgcctttttcggcatcataaaaacggaacagaagattcaggatggagcttttgccggaccccgtatggccgacgagggcgaccgtctcccctttttcagctgtaaagctgatctgtttcagcacctcttccccctttcgatatccaaaagaaacatcgcggaattccactgtcccttccgcctttctgtctgcgggagcgccttcttcttccgtttcctcctcctgtaaaagctcgaatactctggcggcagagacacgggccaattcaagcttcgaaaattggttgacaatccccgtaaccggctggaacaaacggtttaaataatcaacaaatgcatataaaacaccgatcgaaacaattccggccgcactcagactcgcgcctccgaaataccagatcagcccgacaaacgccagattgcgcaacacattgacaagactgtgggacatgagggaatttaaggacagcattttgttcttatagcgaaaatgagcttcattcaattcttcaaattccttcatcgtttccttttcgcggcggaacgcctgaataatcggcattccttgaatggactcgttcattttcgcattgatgttactgttaatggaacggattttttggttgaagacggatgcgtatttgcggtacacaaccgaccagatcattaaaaacggaataatcagcaggcaaacggcggccagcctgacgtcaagcataaacagcgccgtaaaaatgccgagcatataaacgccgcttgtgataaatgtcgacagcaccgttacatataaatccctgaccgcttctgtgtcattcgtaatgcgggccacgacttttccggcaggcagattatcaaagtagcggatcggcattttctgaatgtgtgaaaatacgtcctgcctcatgcgctgtatgatccggttcgctcccatctgcagcagataatgctggccgtaatgaaaacatacggaaaacatgagcagtcccgcgtaaatggcggtcagcgtcagcaatccttttatttcgggacggtaaaattgaaaaatctcctgtcttgataacgtaatggcgggatatgacctgctttctttaccgtttgatattgtcagccggccgtcagacaccgaacggtttccgtcaaaactgacgggacggtcaacaaaatagtagcccgcaccgacttgataaatgtgcgcctctccggttttgtccgcccccggtttgagccggtcctctctgacataatcatgcccccggaacctgacggcgcccggatcgtccgcagaggctttaacccatgttttttcaatgccgagaatgtggtcgtcaatcattttttttccgataaacgggccggtcagctcagtgccgaccgcaataataagcaggacgaccgcccatatcagcagcttcttatattgaagcgcgtaattccataatcttctcccggtcttcatgcgcccgtccccccttcttcaagagaggacagctgctgcctctcatattgttttcgataccagccgttctgcgccaatagctcccggtgcgtgcctctttcagacacccggccttcatccatgacgagaatgagatctgcgtgttcaactgccgagagccggtgcgtggtgataatcgttgttttatgccggcgctttttacggatgctgtcaatgatggcggcttccgttttcgcgtctacggcagaaagcgaatcatctaatatgagaatgtcaggatcggtcaaaagcgctctcgcaattgagatgcgctgcttttgtccgccagagagcgctacgcccttctcgccgacaagcgtctcaagcccgtcggaaagcatgccgatatcgttttcaaaatgcgcatctttcagcgcgctgccgatttcctcttcgtttgcatcctgccggccgtaaagcagattctcttttacagtcttcgaaaataaaatatgatcctgcggcacatagccgatccacccccggagctcctcaagcggaatctcctgaatcggaacgcctgtaaacgtgattgctcccgcaccgggcggatattcgcgcaacagctgcttaatgatcgtcgtctttccgcttcccgtcttcccgacgatgccgagcgtctgccctttttctacggaaaaagatacatcagaaactgccggtcccgctccgctcggatacgtgaaagtcacttgttcaaaaacaagacgcccgggctccttgatgccggcggggtgcttgggtcctgtcacgtctggctcataggaaagcgtctcattgacacgatccaaggaggcatttccgcgctgcatgatattgattaattctccgatcgcaaacatcggccagatcatcattccgaggtacacgttaaacgataccagctctcccagcgtcagccggttttgaaaaacgagataagcgccgtagccgagaccgatgagatagctgaggccgacgagaagttttacagtcggttcaaaaagtgaatcgataaacgccaccttcatgtttttctcatatacatccgccgtcatatcaccgaaccggctgacatcatttttttcctgtacgaaagcccggatgaccctgacgccggataccgactccagcaccttgtcatttaatgatccgaaagcatcctgcgcttccgtaaaccgctcatggatcttttttccgtacaggctgaccgcagccgccattatcggcaacggaataatcgcggcaaatgtcagcttccagctgatgagaagccccattgtcaaaaatatcgtcagcatatacatcgttgaatcaacgagcgttaagaccccaaagcccgtcgtcatactgacggcctgcaagtcatttgtcccccgcgccattaaatcgcccgttctgtatttctcgtaaaacggcggtgacatttgaagaagccttcccatcagctttgaacggagaatcttctccatgacattcgccccgccgaaaagctgatacatccaaaaataagacagtaaatagacggctgccgttaatgcgagaaaaacacatatgtaaaacagcatcccgctttttgtaaacacacccgccttcatatcgtctatcgcgttaccgagaagtttaggcggaaacatttcaatgacattcacaatcaataacagaacaatcgctgtcgtatagcgcagccaataggctttaaaaaaccacgcgagcttttttaatacagtaaacaaatactgtcatcccctttcatcaatcagccgccctcaagctttcccggattgtttttcattgttttcgctaataccgccacatgcatcacacctgtctttctttcatttttttgtataaaaaaagacatgaagcctcagctccatgcctcttattattataaataaggtacagacccgccgtttatgcgcgactgccccgtttttaagcaaatgttcagaaaacggaagctgtatgggagtcacgccggtattcagctgaagatgagttgacaagctttagttttgacatgatccatacctcctttttccctatattgttccttcatcatataaacaaatcctttttttgtcaatgcaggttttgcatttctgccattcgggtattgtaaaacaaaccttttttactgaaaggatgaggccgatgtttcacgcggaccggttgatagcagcttttgacggaagtgatgatagtaaaaaagcgctccaaaaagccatagacctttcaaaaacatttcacgcggatttaacggtcgtacattcccacaatgcaaaagatacccagacgattgttgatcccccgaggccgggagccggggcaacgtatatcggcggcgggattgcaagcgttcctgacccgctccaagcggaaagaatctcccctgatccgatgatttatgaagaccgtacggaagaaatcgttgcggaagcgagaatgctgatgaacgaaagccagattgacggggatatcgacattttagaaggtgatcccgctgatgccattatcgagcatgccgaccgtatatcggcggatttgatcgtcatggggagccgggaccagaacaggctgaaaaaacttttattcggaagcgtcagtgaaaaactgtcatcgaaatccgatattcccgtgctgatcgtaaaataattctttctgtaaagcagcttaatcaaaagctgctttttttacagctcccggctgtttcttctttttttcggcatcacaaaaaaactcgccatgatcaaaaaatcgatgcataatacgacagaccagccctttaacagcttgctgagcgcttcggtgcgggaagcgtcctgaatgagaaataccgttccggctaaaagaacgccgccgatgacaaacgctaatacatgtctcccccacccttttgcataatgtttggcataatccagcccgtaccgtttgaccggtcttgccccttccttgaccacataatagcggaaccgctcatccgcccattgaatcatgcttttcccgaaggcgacagacactccgatataaatggccgccaccgcatgcgccatagtcgccgccgcccctctgtataaatcagctgcggccgccagaaacagtacggcatccaataaaggaatgagagcgaaaaaaaacattccgagcttttgccgcctgaatatatagcgcgccgccaatccgaagatgacagccgcccaaaaagcagcctcacaaatgacaatcaaccaagcaatcgcgttcaatccggttcccccttatcgttttctaaaatgcattgtatcactgctttttatttaatacaactgtgttacaaaattgcaagaaaaaatatttcctgttacactggaaccatgcctaaaataatcgatcatgaaaaaagaagaaaacaaatagccgaagccacttggcggacgattttggagcggggaatggaaggagcgacagtgagaaacatcgcccaggaagcgggtctttctttaggcgcgctgaggcactatttcaccacccaggatgagcttttagggtatgcgatgacactcgtaaaagaaaaagcggccgccagaattaacgaagttgccatgaaagatctgccgccgaaagaaaaagcggtgcgtctgatgcttgaaatcatcccgacagacgaagaaacgatggctgaaatggaggtatggttcgctttcacagcttatgccagacataagggagaagagtttcaaccccagcaggacgggatcttggcatatatccgcggtctgattgactggctggatgaaaataagcttctgaaaccgaatcttgataaagagatcgaagcggagaaaatgtacgccatcgccgacggattggcgctgcatgccatgcttgaacctgagcgtctttcaaaagagaagatctcccgtgtgctcgttcagcatatcgaatctctttttatctgactgaagtaaaaaggccggatgtgttccggccttttttcagcttatgactgaaccccgagctcctgctgaatgtgcgactgaaaagcgtcctgaatcgttttggctacaggtcccggcgctccgcttccgaccggttttccgtcaagggttacgatcgggattaattcagccgtcgttgacgagatgaaaatttcatccgcatccctgagttcgtcttcggtaagagccttctcccgcacctcaatcccgttttctttcatcagctctaacagtttcatccgcgtaatgccgtttaaaatcagctcatttgcaggatgcgtccggacagtgccgtttatgacggcgtatacattggaagaggttccttccgtgaccgctccgtcccttatcagcaccgcttcataagcgcctgcttcataggctttttgtttaatcatcacattatacagtaaattcagactcttaatgtcacacctcagccagcgtttgtcctccgccgttatggcctgcgctccggctttttgttcattttccggttttttcactgaaaaggtgtatgccgtcgtctgcggttccaatccttcgtcatactggtgcttccgcggcgccttccctctcgtcgtctgtatatagaccccgccgtcaatgagtttgttttcctgtacgagcttttgcagatcccattctatgtcctctgcggagaacggcagggtgatgccgatttctgcggcgcttctgaaaagacggacaatatgctcacgcagaccgaataaggcaccgttatacactctgatgacctcatacacaccgtcaccgaattgatatccgcgatcctcaatatcaactgccgcttcttcacgatcaatcaactggccgtttactaatgtcttcatgtaaaccctcctcatcgttatctgccgtgatgtgcattctcagctgttattgtcaactattctatcatactgaacgagcaggctgcggagtttatttttttcttaaaatcttattattcgacatcttttctatgtcttttccagttttgttcctgtatacttgattcgacatacatatgctgttaacttatggcacttcgcaagcctccgctgttatcggcattatgcagaaacttatgctactggagagattgttatgcgcaacacaaaagaaggtgcttccccttctctgttttcattggcttttaaacttacgagtttagcagttttgtgcggactgcttctggtaatcgtcataatgggatattccgcttccgccgcaaaaaacaaacaggtcaccgtgaccgcaaacgggcagcttcgggatgaagcagaaagcctgcggctgaaaaatgattctcccgacgtcttaatgaaacatttgcagagagagcgtgacccagggaaaaaaacggtatatttaaccttcgacgacgggccgtctccatatactgaacagctgttgaatgtattgaaggcaaatggcgcaaaggccactttttttatgcttgaaccgcggatgaaggcctataagcattccgtgcaaagagcgaagcaggaaggaatcgcgctcggcctgcacggcgtgacgcacgataatcacctgttttatcaaacaccgacatcaccgctgaacgaaatgcagcagggacgcgatacactcgaggcaatcaccggagtaaaaacggatcttgtccgcacgccttacggcagtaaaccgtcattgacggatgcccagattaagaatctcgaaaaaggcggattcgtgtactgggactggacgatagacagtgaagactggaagtacaaaaacgcacggtacgtgccggaagtattgaatcagctcgcatatttggaaagcgttcatacgagcaggccgcatgtcattttaatgcacgatctgcctgcgacggtgcacgctttgccgagcctgatccaaaaactgaaagcccagggctactcctttgatgttctgacggatcaaatgattcccgtccatgaataagaaaagccggatctgtatatgatccggctttttttatgtcgcggcgctgatccgttttgcaaattcaccgatcttctcatggatgacaagatcaaataaatggtcgcaatatgtcggctcaaggttaatgatcacctgcttcaaaccgggaatccgtcccgcatcctcagggacaaaccttgccggcgccacttcaagcgaagtgccgatcacaagaagaagatcagctttatcaagcttttcataaagggtttcaaaatgctgaacgagatcgccgaacagcacgacatccgtttttaatacggtgccgcataccgcatgatcaccgatttccgccgtacattccggcacttcgtccttcagcagatgagaaagcccgtagcgcgctccgcagcgggggcatgcggcggtctgaattgaaccgtgaagctcatagacactgctgcttcccgctttcttatgcagcccgtcaatattctgcgtgaaaatgtctacctgctttccccgcctttcaagatccgccaaatacgtatggccggcattcggctcatagcttccgctcattttcatctgaaagagctgtttgaatttaggccagaattcacgcggacggcgttcaaaggattccctgctcatcgcttccattctggaggtgtcttcggtccatataccgcccgccgaacgaaaatcgggaatgccggattccgtgctcattcccgctcccgtcagcaccacgatacgttccgcctgattgatcaatgttataaacgcttccactcttccaccgccttttctttttatcatatcatgaaaaaagaacggcgcctgttatgcccgttctttttctccggaatgatccttcacatgaaccggatcatcgtggcttttctgttttacgaatacattctggcccggataggcgaattccacgccttcctcagcaaaaatatcaataatccggcggttgatatcctgccgcacgtccaagctttccgcccagacgatggtctttgtgtaaaagttgaaaaacagattgtaatagctgtccgcaaacacgtcaaagttaaccataatcgtatcatcatgcacgccttcatgttcacgaagcatttctctgagccttgtgatgcaccgctctaaacgatcaatcggcgtcgcataagaaacacgaacggaaaacgtgacctggcgcttcgtcatcctcgtccagtttgtgatggcttccatggacagcgttgaattgggcacggtaacaagcgccccctgcgccgtgcggaaccttgtgcttcggaatgtgatatcttcaacgccccccgttacagatgacgtctcgacccagtcgccgatcgtaaacggcttttccgtaatgatgataatgccgccgaaaaaattacttatcgtatctttagccgcaagcgcgaaggccaatccgccaagtccgagtccggccacgaacccgtttacatcataattgaattcctgcgcgatcacactgacgctgagcgcgagaatgacaaagcgcagcaccttggataaaaacggcgccaaaatgtcatccatatcaagctcaaagcgctgattgactttatgaaataaaaacgaagacgccgatgtcagattgcaaagcccccaggcgatcagcgcaacgatcagagagcggtacaattttttgacaatgtccatctgcccgtctaaaaacggcgaatactcaatcgccaaaaacagacccagcgccacgaaaaaccacctggccggcttgtcaaacgctacggcaatctgtttgaatatgtcggttttcggcttgtttgccaatttgtaaatgagctgaaaaaagtatttgacaaacagttttctcaaaacgagaaaagccgctaaaattccgatgctgatactgatctgcaaaatatggtcaagcgtaaaaaagctctgaaattgtgtcatcatggcatatgctcctttgtcttgtcgaaaatctattatactaaaacattcggacatcagcttcttttaatgtctttaggcacctgaaaaaccccggcctcagagcacagccggggttttcacacattcgttcatctttcagccagatacaacagggtcaggcactatttcttctttgattgtgtctgtttcaggagagtcgctttttggatttcagcatcggtttcggccttaattctttcttccactttcaatctcccttttcccatgatctcgcctcctttttgccattataaatcatcactgcggattgtaaaccgaaaaaagcactatctttattccaaaaaaatactgtttcgcacattcaccagtttgaatcgctgtgcatatacgaatctgatataataacagaaatgcccatgaggggagctgacaagcttgtataccatcgctcatcgcggcgcatccggttacgcgcccgaaaatacatttgcggcatttgatatcgctgccgaaatgaacgctgatttcattgagcttgacgtccagctcacaaaagacggccagattgtcgtcatccatgatgacaaagtcgaccggacgacggacggctccggttttgtaaaagattttacgctgaagaagctgcagtctctggacgccggcagctggtatggggctgagtttaaaggggagcggattcccctgctcgaagaggtcttgaagcgttatcattctgaaatcggttttttaattgaactgaaagggcacgtttctcaagtcggtcttgaaaaagcagtcggccagctgttaagcaggttttccttttccatccgccctatcgttcaatcattcagcctcaagtcaattcagacctttcacgacatgtatccgtccgttccgactgcaataattgcaagacccagcttcgggatgttttccaaaagccagctggccgcctacaaatcagccgtaaattatgtcaatattaaatatacccgcctgaatcggttcttgatttccaccgctcacagacacggcctgaaagtatttgcctggacggtcagaaatcaaaagacggccgaaaaactgcaaatgatggcagttgacggcattgtaactgattttccggattttatttctaaggatggctgatatgaaacaatatatcgcaatttttatcggaggcgcgcttggcgcattgctccgctttgaaatgagcgcgcacattcacagcggttctttcccggcggccactttcctcgaaaacgcggcgggaagccttttactcagtcttattacgggttatttcatcattcgggctaaacgccctcttttgaccgcctttttaggaaccggtttttgcggaggtttcacgacgatgtcaaccttcgcaaaagaaaccatttttctgctgcaatcgtctcccgcagcggctttttgttatgctgccgcgatattaatctctggcattgcccttgcatacgccggcattttctggggacggcgtattgcccttcacgcagcgggaaaggggcatgatacgccatgacgattgtcctgatgcttatcgcagcgggtatcggagcggtattacgttctcttttgggtaaaacaatttcagaaagaacaaaaggttttccgatgccgcttggaatggctgcggtcaacctgctcggctccttcggcctcggcatgttcaccggcctgggcctggataatccttctgccggcatcatcatcgcgacgggctttttcggtgcgtttacgaccttttccacgttcagtattgaagccgtgcagctgatgatgaacaaccgcataaaggaaagcctgctctacatcgctgtttcagcagccggaagccttttggcgttctggtgcggctttgttatgatatccatttaaaaaaaccttgagcttatttttcgctcaaggttgcgttatgaagcatgaccgtttcaggcacgggaagctggcggtttattgttccctgaccgcccgggcggacctgttcttctttgagttcaagctgtttaataaaccggccgtccatttctaatatgagggcagtgtatcccccgatttgtatcgactcacccgcacagatgtcaatattccgtttcagcacaagtccgccgatcgtgtcgacttcctcttcaatccctgcgccgagaagatgattcacctgatcaatccgaacctttccgtccagcacataatggcgttcggacagcttttgaatctgcggctgttcgtcctcatcaaattcgtccctgatatcgccgacgatttcttcaaggatgtcttcggtcgtcacaagaccggacgttccgccgtattcatcagacaatatcgccaaatgaatccgttctctctgcatttttatcagcaggtcgtgtatcgggatcgtctcgatgacttcaatcaccgggcggacgtaagacgtgatggatacttccgctttttcatcttctgtcataaacagcagatctgaaaagagatgcttcgtattgatcatgccgatgacattgtctttgtccccgtccgttacgggccagcgcgtatatttgtctttcagcatcatatcaagcatttccggcacgtccatatcagtggaaacagccgcgatttcttttctcgggatcatgatttccttggcgatccgattatcaaaatcaaaaattttattcacaaatgtatactcagaaggattgatttctccgttttttaaactttctgacagcaggatccgcagctcttcttcagagtgggagccttcatgctcagatgccggctttaatccggccaaaccggtcagaattctcgcggagccgttcagcacccaaataaacgggaacatgaacacgtaaaataaccgaagcggtccggcaatccataacgtcagcttttcagctttttgaatcgcaaccgttttaggcgcaagctcaccgacgacgacatgcagaaacgtaatcagcccgtacgccgcagcaaaagaaatcacatgctcagcagaatccggcagccccataccctgaaacacaggatgaagcatccgctcaaatgcaggctctcccagtacgccgagcccgatggatgtgagtgtaatgccaagctgcgacgcggataaatactcatcaagatccgtaatgatacgctttgcgagcaccgcccgtctgttcccttctgaaatgagctgatcgattctggatcttctcactctgacgatcgcaaattcactcgccacgaaaaatgccgttaacgcaatgagcacaccgattaaaatcaaactgtcaatatcgtccatttcaccttatcccgaattaaaggataaggacgtcacctcctgatttcatcgttttttcttaagcgagaggaacgaaatgggtgattgactacacagagggccccatcctgccacctcctaagtcaaagcatgattgtcatttgtatagtttattgtatcacaactccattctttcatcattttcagatttttatcatataaaaaacagccttcaaaaagaaggctgccgttatgtgctccggaaatgattttctaaacaaagcgccgtattaatccccccgaatcccatgcttaagcttaacgcatggtgtacggtatgggcgctcggcccgtcggtcacccactgaaacgaatcgtcaatcggctccgttaagtttcggatcggatgaagcttgttttcccgcatttgcaagagagcagcaatgatttccaccgttccggccgcactcagaccgtgtccggtaattgattttgtcgcattaatccgcgcgtgcgacaggccgctttcagaaagcgcccggcattcagtcttatcaccgatcggcgaaccggtgccgtgcgggttgatgtaatcgatttcttttgctgaaagaccggcccgctccagcgcctggcggatcaccgtcatttcgccctctgctgaaggattcgggttgcggttcgcatcagaagccatcccccagccctttaagccggcccacgatcgtgcgcccctctgttcggcagattcagcgcgttccagcacaatcgccccgcacgcctctccgaatataaacccgtccgtatgccggtcaaacgggcggcaggcggcttcaggccgttcagcgtatgtatcagtgcccatcgctcccaaagaacggagagcatgacactccatgtacgacagatcggccagcgccccgatcacgatgcaccggtcaaacaggccgcctttgattccttgagcagcctgaataaccgccgcctggccgctggccgacgcgccgccgaccgtaaaggccggcccttttatcccgaattgctccgtacaaagccccgacaaatcactatccataaaagaaagcccgtatgtcggatttacaaattgcggcgtttcaccgtttttctcaaaggcctgcagcaattcgcgctgcgtcatattcgagccgccgatgatcagaccggtgcggctgtgatcagcgccgtctaattgagcgtcatgccacgcttcatataaagcgataagcgccgtctttcctgataatgcggctcttcggtacaagcgcttggacagcgcgtccggcggcgttaattcgctaagctccgcgccgataaacgaactgcctttctgccggccgggccgtttcatcacatcaaaggcgtgccgcccctccatgagcgcatcgagaaacgcctccttgccttgcccgaccgcggttaagactccgattcctgtaatgctgatctctgacgtgccattatttctcctcgacatttgtccgttctcccatctttatgtattggaagctatgaagaaaaatcttgatacagtgctttgaaaatatcgcgcgactgtctgatctgttctgaaggcacgctgaaagataatcggaaatagccgctttttccaaatccgctgccgggtacgatcaatagtttgtatttctgtgcggcatgcatgcagaatgccacctcgtcttcaatcggtgatttcggaaagacgaaaaagcctcctttcggcatttcaaattcgaaaccggcttctgtgaggatgtccaccataaggtctctccgctttctgtaaggttcagcgtcaatcgaaagatcatccattttcgccacggcgcgctgcatcatgaccggagcgttcacaaaaccgagcgtccggttgcagaaaacgaacgcatccgtcagaagatcgcccccaggcatttgggcgtctgccgcgatatacccgagcctttcccccgcaatgccgagatctttactgaacgaactgactaaaatcacgcggtgatacgcctgaaacggattcgcctgctcttctccgtagatcagctggctgtacggttcatcaaataaaataaatatgctttggccgttccgctcttcggcttcttttaataaggcgcccaattcgttaaggtttttctggctgagcacagtccccgtcggattatgcggcgtattaacgatcaggcctttcgtacggggggtgatcgcacctttaaccgcttcaatatcaatctcaaatgagtcagtcagcgggcagatgacgggtctgccgcggtaattttcaacatacgctttatattccgcaaaataaggcgaaagaaggatgacttcttcctcggggtttaaaatgcttttcagcgcgacattcagcgccccgccggctccgaccgtcatgactgtatgcctggcggaaatttctgtctgaaaccgctctgacaaaaagcgcgcaaccttttctctcgcctccggaagcccctggttttgtatgtatccgtgccgccctgtttcagccgcttcgcaaagcgcctttttaaatgtttcaggcggctccgcaaccggatttcctattgaaaagtcaaacaccttatcggcgccgaactcttttttcagccgagcgccttcatcaaatagtttgcgtatccatgaccctttctccagattctgtgtcacttcccgtgataaaccggccactgtcatctgtcccttctgtctttttcttccgtttctatttacaatgattatgaaagatttacatggcgcagtcaacgctttttcagacagcccgccgcgccgtttcaggagaaagacggaaaacaataaacttgtgcaaactccccttcatatattaaactattctcataactataacgtgatggttggggagggatttagatggggctgagacttatcgcatcagtgaattagcagagcttgccggtgtaacgaaacgcacggtggattactacacaaacctcgggcttttaaagcctgacaggtcttgttcgaactatcgttactacgatacacttgcacttaatcggttaaagtttatagtcgcttgtaaaaagcagcgattggccctgtctgatataaaagatcgactggagaaccagtttccctcttcagccctgcctgacgatattggaaatctggcatcggaaattgatcacatgaatcaaaacatctccgtgatcttgaatcggtttgaaaagcttgaaccagaggagcgcgcccagctgaaaaaaaggctggctcctgaaaagcttgcagtgcttcaatcatttatgctgctgttaagttaaaccattatcttactaacaggaggtgttaccttcatcttcccaaaagaagtgaaggttctaattggacattgtgaatttgattttagtcgcggttttaatcgcgctgacggcatttttcgtagcatctgagtttgcgataatcagaatcagaggctcacgggttgaccagcttatagcagaaggaaataaagccgcaatcggtgtcaaaaaagtgaccacgcatttagatgagtatttatcggcgtgccagctcggcataacattgacttccatcggtcttggtgtcttaggcgaatcaacgattgaacgcttgcttcatccgcttttcacaaagataaacgtaccaagctcattatcgcatattatttcatttattctcgcctatgcgatcattacattcttacacgtggtcgtgggagagttggcgccgaaaacagtcgccatccagaaagcggaagccgtttcaatgctgttttcgaaaccgctcatttggttttaccgcatcatgttcccgtttatctggcttctgaacaactccgcccgtcttttaacgaagacgttcggtctggagacggtatctgaaaatgagcttgcccactctgaagaagagctgcgcatcattttatcggaaagctataaaagcggtgaaatcaaccagtctgaatttaaatacgtgaacaaaatctttgaatttgacgacagacttgcaaaagaaatcatgattccgcgtacggaaatcgtcagtctgccgcatgatatcaaaatttctgaaatgatggacatcattcagattgaaaaatatacccggtaccctgtcgaagagggtgacaaagataatattatcggcgttattaacattaaagaagtgctgaccgcctgcatcagcggcgaagtatcagtcgactcgccgattaccgattttgtcaatccgatcatccatgtgattgagtcggcaccgattcacgatctgcttgtaaaaatgcagaaggaacgcgttcatatggcgattctgtcggatgaatacggcggaaccgcggggcttgtcaccgttgaagacattattgaagaaatcgtcggggaaatccgtgatgaatttgatatcgatgaaatcaacgaaatccgtaaactcggcgacggccattacatgcttgacggcaaggtcctgattgatcaagtgaacgaactcctcggcatccatttggaaaatgacgaggtcgacaccatcggcggctggttccttacccagaaatacgacgtcgaacaatacgactcgattatcgaagaaggctgtgaatttatcattaatgaaattgacggccaccacgtcgcatatatcgaagtgaaaaaactggcgtttgatgaactgctggaaaccgccgaacaaaaagaagcataacaaaaaagcttgcgcgtctgatacagacggcaagctttttttcatttacagttgttcaagttttttctcaagctctttaattctggcattcagctcttctgtcatggccgcaagcctctccttcggcgcaagatcggaaaagtcctccaaaaaaatcggctcgccgatgataagccgcatttttccctttttaaacagcgcttttcccgtagacggccctttatatgcggccggaacgagcggcgcttttcccatttgggcgatggtcacggcccctcttttcagcgggacgtcttctgatgttctcgtaccgctcggaaaaatcccgacaatctttccttccttcagaagcttaatcggcgttttaatgctgcttgggcccggattttcacggtcaaccgggaatgcgtgaatcttcttcaaaaaacgtccgatccactttttctgaaacagctcttttttcgccatataatgaatctgaaggggcaatatcccgacaccgagcgtgaggacatccacccagcccgcatgcgtgcacgcgataacgaatcctttatcagacggaagattctctttattgtacactttcactcctccgcgcagggatagaatgcatttgatggcatttgcacaaaacttatacataacgcacttcctttgttgtaatgatcaaaagtgttctctctctctattataacaatattttttattacctggtactaataattatatttttcctccgccgatctctatcttttatgacggattttgggtactatagagaaatggtgtttgatgaggtgaaaatgaatttaagccgtttgcatggaacgtgcaactttaaacctttcttatgcgtgtataacatagaggggagaaaaggcagtgacgatcgatgaaatttaccaattgtatatgaatgatgtttaccggttcctgctctccatgacaaaagacaagcatctcgctgaagatttgctgcaggaaacctttatgagggcatacatacacattcactcctacgaccacagcaaagtaaagccatggctttttcaagtggcgagaaatgcgtttatagattatgtcagaaaacataaaaaggaagtgaccatttccgatgacttaattgggagcctttttcagacggctgttcaaagcccggctcatcagattgaaatcaaggaagtgctgacagggtatatgtccgaacttcccgacaattatcgggaggccttaacactgtattatttaaaagaactgaattacaaagaagcatcccatattatgaatatttcagaggctaattttaaaagtgttttatttcgtgccagacagcggctgaaagcactttataatagaggtgttaatgatgaatgaagaatttaaaaagcgtttttaccaatacaaaaatggagaaatgagcgaccgggaaatggccgcctttgaagaagagctggaaaagctggaagtctatcaggagttgattgaaagcgaaatgcaggacgaccgggaatgggacgtcggcatcagcccggaaaaacagaaggccattttatcatacggaaaacgcaaatcgtatttgcggatttcagttctcgccgtcatctccactttgatgattttgccgctttgcacattaggaagctacctctattacggtctgggaggaaaagaaagcaccggcaatcaattaatggagaccgcggcagtgacggtggcgaccacaatgccgaacgtcctcgtcgatacctccggactgaaaagccaggtgaagctgtttggaatgaatacggaatttccgctgcaaaagcagatcggcacaaaaacgaaatccgtcggcggagaacggattgaaatgtttttagatacggtcaaatcgcctgccgttaactactatgatctagacgcggcacaggcaaagcattatttcgcccatccttccggcttaaaggaacgtacgattgaaaaagccggacagacattaaaaaaattgcctgaaggaagcgtggcggaggtctatctttcttatgacagggcctacccttcttctcaagtatattcgacttttaaaaaatacgatgtgaagtttttatggaacgcggtcgaaacggagaaaaatctgaaagacagtccttatgcagagccgttaggatttcccgggaaagattccaagatggtgtcctctttcgaaacgcaaggacagacagaccgtgaacaatttatcaatgcccttgaatttatgtcccgccataaaaaatgggcgcatgcaatatcgaaacgcaaagacatgaatcttggcagccgaatcgactatgttgaacatcacggaatgaacgtatacggctctgtcgtgacggggccgacaaaagaaatcgaacgtctgctgaaaaacaaaacagtaaaagcagcaaacatcggtgaggtggaattatggaattggtaagaatttttaaagagcataatgttttcggctggatatcagtcggtaccgcgattttgtcgctgctgcttttgaacgtggcaatcatcagcaatgtgactttctattcttatcagatgctgccgtttgcgatggccgccgtgccgttcggcatcattgagctgtttattaaaaaaggacggacgggcccgggactgctcggtgtcattctcaatctgttcgtcattgtctgtgtatatacgatcgttgcggttgatacgaatctgcaattcggtttttaaacataaaaacaggcccttttacgggggcctgtttttttaaaatgaaagaacgccgattaaatgcagcaatacgacgatgatagccagcggcacgagatatttcagaaggaaataccacacctgaaagaaacgatagccgatggcggaaccgcttttcatctcggcaaacagctcctgcttcggtattttcagcgggacgaagattgatattaataaagcgccgagcggaatcagcacattgctgacggtgaaatccgcaagatcaaaaaacgtttttccgaacaaatgaacatcaccgagaacaccgtatgataaacaggacggaattccgactaagaaaatgagcagaccgcttgtccacgacagcttctttcttttcgtttcatcacctttcccgacagtcgccacgataatttccaccatcgaaaaggccgaagtcagcgcggcgaagaaaaagaccgccaaaaagctgataaaaaacagcgagccgaacggcagccggtcaaacacagccggcagcacggtaaacagtagtgtaggcccttcatccggtttaaagccgaacgaaaaaaccgccgggaaaatggccagtcccgcaaacagcgtaacgagcacattcatcataacaatggaacccgccgaacccggaagattttgggttttcggcaggtacgaactgtatgtcaccatgaccgaaacaccgagcgttaatgtaaaaaacgcctgtcctaaagcatataggatggattccggcgtcaaatcttcaaagtgcggaaccaataaaaatctaatcccctcaacggcatgatcgagcgtgactgatcgcagcacaagcaatagaaacagcacgaataaaatcggcatcagcaccgcactgacacgttcaatccctttctgcacgccttttgcgacgaccgccaccgtcatgatcataaatacaagctgcgcaatgagagtctggatcggattttcaatgaccgtcccgaacaccgtgccgtactgctcctgagtgagcccggataaagaaccggtaacggcttttaacacataaagcaaaatccacccgccgacaacactgtaaaaagacaaaactaaaaaacaggccgccacacccacataacccgtaaggtgccataccgacttcggcgcggcttgtttgtaggcatcaatcgcatttgtctggctccgtcttccgaaaataaattcaccgagcaaaagcggatagcctaaaagcacggtaaaaaggacgaatacaagaaaaaaggcgcctcccccgttcgtacccgctacgtaagggaacttccaaatggctcccagaccgatcgccgaaccggcagcggccataataaatcctatttttgaggcccattgaacccttttttggtcagacacgactttccacttcccttccgccctatattatcccttattcgctgcgataacttaagcccatttcaatatgtttcattattccgaaaaataaaaaggagcggcgggtgccgctccttacaaatccccgtttaatttcgaatgctttctcgaatataagaaataaatcaccagaccgatgatcagccagataaagaaacggaatatggtggtggcgccgaggttaataatcaaaaacacgcagaacagaatggacaataccggaataaagggaacccccggacatttaaaagcccttggcagatcaggctgtttctttctcaatacgataaccgccacggaaatcaggacaaatgcggcaagcgtgccgatgttcaccagcttcgccagttcatcaagcgggacgagcgagccgagtaatgccgacaggatgccgaaaacccatgtcaccacgtgcggcgttttatgcttcggatggacttttgaaagcgcccccggcaccaaaccgtcacgggacatggcaaacatcaccctcgtctggccgtacagcatgacgagcatcaccgttgtcatccccaacactgcgccgatatcaataatcccggccacccaattctgtccggccatctgcaggacgagagacacgggatggtcaacgccttcaaagcgggcaaacggaacgacgcccgtcataatcgccgatacggtcacatacagcacggtgcagacgattaatgaaaagataattcctttcggcagatccttcgccggatttttcgtttcttcagcggcggaagagacggcgtcaaaaccgataaaagagaagaaaacgagcgccgcggcactgaaaacaccgccgaaccccatcggtataaacggctgccagttgtgaggtttgacatatacggccgcaacggcgataaacaatagaacaaccagaacctttaaaatgaccataatattattgacccgcttcgattccttaatgcctaaatagaggaggaatgtaatcgcaagcacgataacaaatgcggggagattaaagaatgtgaccgtgcctttaatggatcccggcgcggccgttaatgcggtcggaagatgaatgccgaagcccgccaagaatgattgaaaatagccggaccagccgaccgaaaccgcgctgacggcgagcatatattccaagattaaatcccatccgatgataaacgcgagaagttcacccagtgtcgcataagtaaacgtgtagacggaacctgaaaccgggacgcttgaagcaaattcggcatatgacagagccgcaaataaacacgcaagagcggcgatgacaaatgaaacggtcagccccggccccgccgtgacagcgcctgttccggttaatacaaaaatccccgttccgatgatggcccctatccccagaagggtcagatcaaaggcccctaactctcttttcagcgacttttccccgcccgttgcggcaagcaggtcctgaatgcttttctttctgaatacgctccccttcatctgcttcactccttgtaaatcaatatatgttagaatattcagataacaatagcaataatgactaaattcttatttttcgcatgaaatgtttcagcacatcatccctttctcctatgtcatattatagcgaaaaatataaaaatgaaaataacttttttgaaaattctatatattatttttagttttcataaaacagaactcagcggattctccactgtgaaatattaacattagtgattcagctggcgacgtccattttttgaaaatcgtattcatatgtacgttcaaataaaaatcccgcactctttaaaagcgcgggataagacttgcgtattatgttgaaataaatcttccgccatttacgtgaatggtttgccccgtcatataggaagattcgtctgaagccagaagcacgtaagctccggcgtgttcagcaggctgtcccggtcttcccatcggagtgtccagaccgtgcttttccaccttttcttcagtaaacgttgccggaatcagggcggtccagatcggcccgggggccaccgcattaactctgatcccctgatcggccaatgacatcgccattgaacgcgtaaaggaaacgatgccgcctttcgtgcacgaatagtcgatcaatgatgtgtctccctgataagcggtaatagacgttgtattaatgatggcgctccctttttgcaggtgaggcagcacggcttttgtcatatgaaacatagaaaacatgtttgtacggaatgtcttctccagctgttcagctgtaatatcaagaatcccgttttgcggatgctgctcagccgcattattaacgagaatatctatttttccgtagcgatctaagacttgccggaccgccttctgacaatgcgcctcatcaccgacgtctcccggaattaacaggcattcggcctggtattcttccgcacgctttttcgttctctcagcatcggcatgttcgtctaggtacaggatggcaagatccgctccttccttcgcgtaagcgatcgcagccgctgcgccgatgccgctgtctccgcccgtgatgacggcgacttttccttttaatctgcccgacccttttacatccgggtcctccaagagcggttttggctccatgtctgactcaatgccgggctggcggttttgcacctgcggcttttgtccttccgtctgtctgtctatcggattcatattctcacactcctgcaattggtattactgagacgataccacgcagtgcggggagttaaacggacaaatatgccggtaattaaagctgctgagccgtttcgggaaaagcgccggtgtatttcgcagacggcctgtaaatcatgttgtcagcggactgttcaagcacgtgtgcgcaccagcctgccattctgcttgctgaaaaggtcggcgtaaacaaatcattgtcgacatcaatggcctgcatcacagccgctgcgtaaaactccacattcgtatacagcttccgtccgggcttatattgctctagcaggcggatggcttccttctccacataaagcgccaagtcaagcgacggatcatttcccgccacctcttcagcctttatgcgcagcgcttccgcccgcgggtcttttgttttgtacaccctgtgcccgaagcccatcaggcgttctcccctcataagcttcgctgccaaatacgcttctgcattttcttttgtcccgatgtcttcaagcattttcgtgacgcctgaaggcgcgcctccgtgcagcggccctttcatcgtacccagtgcggcagtgacggcagacactaagtccgattcagtcgaaacggtgactctcgccgaaaaagtcgatgcattcatcccgtgctccatcgccagaatcatatacgtctcaagcgctttcttttgggctgcggacggctgcctgcctgtcagcatatacaaatagttttcaacgtgtccgtatcgcgcctcaggtgacaacgcttcctgcccttgtttacggcggtatctgtacgcaataatcgtcggtgtgacggcaatcagtttaatcgcttcttccggcttgggcggatatgtaaatgaatctgtgcccaaacctgaaacagccgttctcagcaccgccatgtcatccatttcatccggaagcgtttccagtaagtcgatcaaatgtttcggaagcccgcgctcggctgcaagttcttcctgaaacgcaagcaattgccgctcatcaggaagcgccccgttcaaaatgagatacgccgcttcttcaaaactggattgcagcgcgatatccttcgcgtcatagccgcgatatattaaatgccccttttctccgtcaatgtggctgatcgccgtttctgcacaagtaatccctttcaatccacgataaatcaatttcattcccccttatcctctttctgttattatagtaaatataatatttaaaaaataatgaatatttttaagggaattaattaaaacttttaatcagaggagtgcatctatggattttaaatggcttcacaccttcgtcaccgcggcaaaatatgagaatttcagaaaaacggcggaaacgctttttttatctcagccgaccgtcaccgttcatataaaattattagagaaagaaatcagctgcaagctgtttcagcggagcggccggaaaatacaattgacggaagaaggaaaagcatacgtgccgtttgccatgaggcttttggaagactatgaaaacagcatggcggagctgcacagggtgcgccagggctactcgcacacgctgacactcgctgtttcgccgcttatcgccgacaccgttctcccgtctgtcatgaagcgttatacagaggacaataaagaaaccgaaatgacggtcaccattttcgaatcggaagaaatcgcctctcaaatcagaaacggctcagccgatatcggactgagctgcttaaaggtgcaatcatcttccctcacttgccgccccctgtacaatgaccccgttgtcctcgtcgcgccgcccggccgaaaacccggaacagggaaggcggatgaagtgaaagacctgttcggacaatatctgcttttgacccataaccatcctgactattgggatgatttgctccgccaggtcagaatacagttccctttcgtcaggacaatgaaggtgacacagacgcatattacgaaacgatttattaaagaggggctgggtgtctcatttctgccgctgtcagcggtacgggccgaactcgccgcaggcagcatgattgaaattccgtgcgaattcgcccagatgccgagcgcgggcgcatacgccatcgccctctatgaaaatgaaaaaaagaaaacctttttagattttttatcacattttcatttttaggtgaaacaaatggagctctgtcccgtctaaataaaaaacccgttctgatgaacgggtttctatctctgctagaatcttttcgcgcccaggtagcgcggtttccagtagctgttattcagatcacttgttgtgacgccgtcagaaccggcatggatgaacttgttgtttccgatgtacacacccatgtgtgaagggccggcctgatatgttgtaaagaagacgaagtctcctcttgacgggctggacacgctcttcattgagctccagtatcccgcagtgctcgttctgccgacactcgtctgtttgtttaacaggtaccagataaatccgctgcagtcaaagccggaagtcgttgttccgccccatacatacggcgtcccggttaaagattgcgcatcagaaatcagcttgtttacattcaggctcgtctgtgcaacattatggctggatgaaggctgctttgatgacgaagatcccgaagacgttgaaccggaagttgatccctttactttaagaacttgtccgatgcggatcaggtccgtttttaaaccgtttaaactttttaattggtttaccgtcattttatatttattcgcaattttccaaaggctgtcgccttttacgactttatatgtagacgatgatgacttgctgcttgagcttgaacctgaggatgatttaccgttaatcgaaagcgtctgaccgatgtaaatgatatccgattttaatttgttctcagatttaatggaattaattgacgttccgtaccgatttgaaagtccccataatgtatcgcctttttttaccttaatcgtttgcgcagatgccgcgcccgcaaacaaagtcgtccccaaaaccactgccgttgttgctgtaacaagttgctttttcatattttcctccctgaatgattctatctattttatgtgtctcttttttaaagtttttatctgtttcctattataaggttcaatttccactagaaatagacttgacttcccgtgacaaatttcttactaattcgttttagaaaaaagtttttaagggtattaaatatttcaatttgatttcaaacgtgacgaaaaacgagtcaatttgtcatgtttttttcctgtgatcctcgtattttggaaaaacaaagcagtttattttccaaataaccccttgttaaaaaaatcctcgactttttcaaaaaagtgaatggttttcatcctttcttgaaaacataagttacaccggaatttacatttctaacaatgtttcacctgaaatttacaggaggaacaggcgctctttacaaacaccccctaccattagacatgcagacacgattaaaggaggacgagtgagaatgagtctatttaaacaggttcgatcaaaacttctgccggcggcagccgtatccgtgctgacagccggtctgattgcgggcgcggggcttcagcactccgaacaggctgcggcaaaaaaacagcctgacaaaaacgaaatcagaaacgtcatcttcatggtcggcgacggaatgggcgctccctatatgaacgcctaccgttcggtcattaacaaaggaaagccttcggatggtatgaaactgacggcattcgatcccaacctcaccggtatgatgatgacttatcctgacgatcctgattccaatattaccgattccgcggcggctggcacggcaatggccacaggcgtgaaaacgtataacgcggcgatcggagtcaataaaaaaggaaagcgggtaaaatccgtcctcgaagaagcgaaacaaagagggaaatccaccggacttgtcgcaacttcggagattgcccacgccacccctgcggcattcggagcccataacaaatcccgaaagaacatggatgacatcgcaagcagctactttgatgaccgcatcaacggaaaacagaaagtcgatgtgctcctcggaggcggcaagtcaaactttatccgtaaagaccgcaatgtaacaaaggatttcaaaaaagcgggatacagctacgtgacatcaaaacaggagctcaaaaaggatcgtaacaagaagattctcggcctgtttgccgatggcggactcgacaaagcaatcgaccgatcaaacgccgtcccttcattagaagacatgacaacggcagcgatcgacaggctgaacaagaataaaaaagggtttttcttaatggtcgaaggcagccaaattgactgggcgggacatgacaatgatatagtcggcgcaatgagtgaaatgaaggattttgaaaaagcgtataaagcagcgatcgcatttgccaaaaaggacaaacatacgcttgtcgttgccacggctgatcataccaccggcggattgacgatcggcgcgaatgacgataaaaactggcatgttgaaccgattcttgccgcaaaaaaaaccccggcatttatggctgaccaaatcaaagcgggcaaatccgtatcttccgtgcttgcgcgttatacagacctgaaatggtcaaaagctgaaatcaaacagatcgaaacggccgcaaaacaggatgctgacaagagcatctacaaagcgatcattaagctctttaatgcgaaaaccaacagcggctggacaaccggcgatcatacaggcgaagaagttcccgtttacgcatacggtccgggaagagagtcatttacggggcttttaaacaacacggaccaggccaaaaagatctttcacatcctgaaacacggaaaataaaaaaaggatgcgggggtttccccgcatcctttcttcttttacagatatctccggtgcactcctttgccgtcatacgaaaacatcacttctctgtcttcaagaacagattcgatgtgcacgctcctgccccacagctggtacagatacggcagcactttctccaaatatttcagatcaagctcaattccctcataccaatgtttaatataaagctcattattcttcaggtaatccccgtcattgacggtcagataaggaaatcccccgttgacccgcatgttcacgagctggtcgcgcacggccttccattctttgtcgatcactttatagtccctgccctgtttttggaataaatacaaatcctcacgcatcacgagatctttcgtcaaataattgcggataaatgatatatccgattcaatttccctgacctcaaacattttttcgcgtccggaaccgggctttactcctgtttttttcatttcatctgtcgggttatcataacgctcttcgatgtcttcaaaaattttcagccctaaataatacgggttgattcccgtttttgacggctggacaacgcctgcgttcagcttcgcaaattcgatggcttcatctgaagtcaggtcaagctcgcggataatccgctgatgccaataggatgcccagccttcgttcatgattttcgtttccagctgaggccagaaatacagcatttcttctctcatcatggttaaaatgtcacgctgccacggttcaagctcccgcgaatgttcctcgataaacagcagaatatctttttccggccggggcggaaacggttttttcccttttttctttttcacctgcttcggcttatccattccccataaatcatcgtaaggcgatggcgcggtttcttcttcgtcctcctcttcgtcatcgacgctccacagcagcttcggcctgacgagcgacggatcgatatgctcctgaaccgccagaatggcatctaaaaaggactccacctcttttatcccgtgaattctttcataatgcttaatccgctccgccgcagccgccatactctcaaccatgtcccggttcgtattttgaaagcggcagttatgtttgaaaaaatcacaatgggcaagaacatgggctacaattaatttattttggatcagcgaattgctgtccagcaaaaaagcgtagcaagggttggaattaatgacaagttcataaattttgctcaaaccgagatcataatggagtttcatcttgtgaaattgtttgccgaaactccaatggctgaatctcgtcggcatgccgtacgcgccgaatgtataaataatctcagccggacaaatttcatatctcatcgggtagaaatcaaggccgaaacccttcgcaatgtcggttatttcctcaattgcccgctgtaaaccttttgtctcctccgcgttcaaccgaatcccccctacttggacttatttataatgtatgacccctcctctcaaaagatgaaataacagatcggtttccgtctgaaaactttcggcacacccgccccgtttgctttatatgtaagtgggtaaaacacacaccataccccaaaaagaaaaggagcgattctacttgaatacagcagacatgctaacgacgtatctcagcaaactcccgaatctggtcattgcactgctcgtcctgcttatcggctggggcattgccaaaatcattgaaaaagctgtatacaaaggcctgcaaaaaacaaaaatcgacgacagactgttcgccgaaacaaagccggcgcgctattcctcagaaaaagtcatcagtaaagtcatttatttaatcgcattaatcatcgtttttattctattctttaacattctgcatctgacaaccgtggcttcgccttttgtcagcatgctgtcagcgataacggcggctgtgccgagcattttaaaagccggcctgattctgctattgggctgggcggccgcttcgcttttcagctatctcgtcaaaaaagcgggcatgaaactcgctgaaaacggccggctcagaaaatggacaatggtgtctgaagaagcggagatgagcaaatccgttacggccgcttcacgaatcgttttttacttcgtcttgctcttgttcctacccggcgtcttggccgctctccaaatcagcggagtatcagggccgtttacaaatatgatccaaagcgttttgtcctttataccgaaattattcgccacggcgctgattgttttaatcggctggcttgttgcccgtctcgtccgtgatatcgtcacaaactttctggcgagtatcggcacggaaaggctcgccgcacgtatggggctttctatatacctgaaggatacaagcctgtcggcaatcatcggaacgattgtctacgtgctgattttcattccggtgatcatttctgcgcttgaccggcttgatgtggcgggtatttctgaaccggcgtcagccatgctgcacacggtcttcacaatgctccctaatatcatcatcggtatcgtgctgatcatcgccggcatctggatcggaaaatgggtcaacagcattgtatccgggctcttgcaccgggccggtttcgactctcttctcggtaaaatgggctttgaacagacgggtaccccgaagctgacgctttctcagacggtcggcatgattgttcagatcatcatcgtcctgctgtttacggcagaggcgctgcagcttgttcatctcgaatttctcgtcgttatcgcaacaggtattatcgcttacctgcctaatgttctggccgctgtatttattctcggaatcggacttttggccggacagctcgtcagcaggctgcttgccggcatgctgagcggaaaggaattcagattcctggcgccggttgcgaaatataccattatcactctttcaatctttatggcgctggatcagctcggtgtcgccgacacgatcgtaaatgccgcgtttattctgattctgggcggtttcgcgcttgccttcggactttcattcggtcttggcggaaaagatttcgcctctcgttatctcgcaaaattggatcgcaaaattgaaaaacatcaatcggctgacgatcggaagccgccgatgtcttaacgaaaaaaacgtgtgctcagaaggagcgcacgtatttttttgagttaagggggcaaattccttttttttcattttagattcatatatgatagactgtaacagaagcaaaatctcttttttcgaggtcattctatgaaattaacgaactataccgattattctttacgcgttttgatttttttggcttccagacattccgatgaactttccaacataaaagaaatcgcagatacttattccatctctaaaaaccaccttatgaaagtcatttaccgcctcggccagctcggatatgtcgaaacgatccggggccggggaggcggaatccgtttaggaatgacaccggaagacataaacattggagaagtcgttcgaaatacagaagacgactttaacatcgtagaatgctttgactccaaaaaaaatctctgtatcatatctcccgcctgcaacttaaagaaccttctgaatgaagccctgcaagcttacctggccgttttagacaaatatacgttaagggatctggtcaaaaataaagaggagattatgagactgctcagaagctgaaggaatgcccgcattccttctttttttatgccggcataagaaaaaaggactatttctattaatatgataaacgattgcagacaagtgccgatataaagattatcattactgatatcctcaccttgcggctgcaacgaatggggatagtaaaatcatcgcaggaaaagggagattcattatgaaaaaaaaggtagcggtcggtttgactgcatctgcgatcgtcgggtctgcgttagctgtaacaccggcagaagcacaaacgattaaggttaaaagcggagattcattatggaagcttgcccaaaactacaatacgagcgtggatgccattacatcagccaatcatctaaaatccaccgttctttctatcgggcagacgctcaacattcctaacggcaaatcagattccggcagcaaaaagccatcttcaaagaacagcggcacgactaaaagcgtttatacagtgaaaagcggcgactcgctgtggctgatcgcatctgattttaaaatgtccgtacaggaactgaaaaaattgaacggtctgacaagcgacttaatccgcgcgggacagaagctgcaagtgacggggaaagtttcctcaagcaccgatcagaaaaaaaccgctcctggcagcagctcaaacagcagcaaaaagcagtcatcatcttccgggacgtataaagtcaaactcggcgattcactatggaagatcgcaaacagcgtcaatatgaccattgcggaactcaaagtattaaacaacttaaaaacggatacgatctacgtaaaccaagtcctgaaaacaaaaggaacgtcttcttcgggaaacacgccgtcaaaagacaattcaaaccaaaataaaaaccagacgcaaacgtcctcctatacagtaaaaagcggagactcactctggaaaatcgcaaacgcatacaatatgacggttcagcaaatcagaagcatcaacaaactgacgtcagacatgctgcgggtcggacaagtgcttaagctgaccaaaacgtcatcttccggctcttcgacttcaccgtcaactccgaaccagtccggaaatacagggaaaaccactacatataccgtgaaaagcggggattctttatgggtgatcgcccaaaagttcaatgtgaccgcccagcagatccgcgagaaaaacaatctgaaaacagacgttcttcaaatcggacaaaagctgacgattaccgggcagcagacaaacacgactccgaatcagtccggcaacacaggcggcacaggttcaacaagcgcgaagattaatgtaatgatcgatgccgcaaaagctcagctgggcgtaccgtatgtatggggcgggacgacgccgagaggctttgactgcagcggtttcatttattacgttctcaataaggtcacttctgtatccagactttcagccgcaggctactggaatacgatgacatcagtcagccagccggcggtcggtgactttgtctttttctcaacttataaagccggaccttcccacgtcggtatttatctcgggaacggccagtttattaatgccaacgattcgggtgtcgttatttccagcatgaacaattcctattggaaacagcgctacctcggcgcaaaacgtttcttctgatatctgacaagctgtacggcctcaataaggctgtgcagctttttttacagtctgaaaatattaatgctgatcacgtgttttgtcaccggatggaaatacacttcagcacgggatgaaaacgtttcttttgttgtttgcaccgttacgcgaaacacatctttcgtctgttcccggttcacttttgtacggcccatgtacgaataatcggtaagctcggcccccttgtattcacgttcaagctggttccatgcgagctgttcccatttttcaactgacggatcaaggtgttctgtatgccctttttcagcgatcgaggcaatgagaatgccgcaaaacaagagggcaagcacaaatggaagggatttcatctttatgttctcctgagtcgttttttgtcaatcttagcgtgtccaaagaagagacggatatgcggttttattttatgtctccctcatattgctatgccgctgtgataaggacaccaacttttcccccgttgcatcggtcttcgacggcataaactaacggagaacttctcattgaaaggagaagcgtaagatggatcatgcggattatgataaagccttatattacacacaccggtctcaatgggacaatttgttaattttgatggttcgtacaaaagatgatttattatcaaagcgtattgagtactttctgcacgcgtatcatttcgaatatgatcatgcggtgcttgaaaaagagctgtattcccttctcgggtatattgatcatgcgacagagctcgcttatgaagatcaattagccatgctgacataaaacaatcccggcgtcagacgccgggatttcttgtatttgtgaacatattcagctcttcgatcatctctttcaggctgactgccatatcctcagatacggtccggcgctccatgtcaatgtgaatcgggtctaagaccagctgtttcgggatgacatttgcataaacgccccgcatgaccgtccgcatattcgccagcgcgttcatgcctccttttcccccgcccgccgcggcaatgattgccaccggtttgtatgcccagtgatcgctgcttaaaaaatcgatggcgttttttaaagcgccgctcatgccgctgtgatactcgggagataataagacgacggccgccgactttttcacctgccgccttaactcttgcactgcgggcagctcgttctgttcttcttcaccgttataaagcggcagttcactttcgctcaaatcaataaaatcggtatgaaaccgatctcttatataagaagcggcaattctagtccgcccgttttttctcggtgtgccgctgatcactaatatgctcatcattttaccgcctttccaaaaacattatattttaccgcatacaatgccgcctgcgtccgatcggaaagattcagctttgacagcaggttggacacgtgggttttcactgttttttctgaaataaacagtgccgccgcaatttccttattgcttttccctttggctatttcttgaagaacatctttttcacgaggggtgagctgatcatatttttccttatcctgatcgtcctgaaccatatgggtcagcacgtgaggcacaatatccgccgacagccggtaacgtccggaatacacttcccagagcgttttcactaaatcatcgggctgggcgtctttcagctgatacgcttttgcgccggctttaagggcgggaatgacatgctcctgatcagaatagctcgtcaaaacgacgatactgatgtccggaaatcgttcagccgcaatttttgccgcttctatgccgtccatatcaggcattgataaatccatcaaaatcatgtccggctccgtcttttcagcttgctgaagcgcttcagcaccggtggacgcctcaccgacaacttcaatgtcttcctgagtggcgaagaaatagcgcagtcctttgcggacaacgtgatgatcatcagcaatcggcgagcgtataagacccgtccggctcaatcagaaaaatccaccctgtctgcagcccggtcaggctgagcagttcgcgaagcactttatcaagcgcttcctttaaatcgtggctttggtttaaggtttccgcaatcgcttttaacgtttttaacgtttctaccgtcgttttcgtcaatttccctcactccggccaatcagaattatccatattatatcaattcttttctgtatattcctttgttttcagcatgaattttcctcatactttcggatgaggcgtataaaaaaaccgccggaagtcgcttccggcggtttgttgtttatttcgttttttccactatgccatccaccgttttcatgacggcttcagataatgcggcaagacgctgttcgctgtcttgtaaagaagttcccttcacggcgaaatagaacttcactttcggctccgttcccgatggacgaaggcagaaccaagagccgtcttcaaggaaatatttcaggacatttgacttcggcagatcaatatcttcttcatgatgatcggcaaatacagtccgttttcccgttgaatagtcttcagcctgcgtgatttgttttccggccatctgcttcggcggatcgtttcggaaggaagtcaggatagcggaaatctgctctgctccctgttttccttttaacgtcaatgacttcaagccttcacggtaatatccgtattctttaaaaatggacagcagcgcgtcataaagcgacatgccctgctttttataaaaggcgcatacctcgacggctaacagcgcagcctggatcgcgtctttgtcacgcgcgaaatcgccgattaagtagccgtagctttcttcatacccgaactggaacgtgtattggcctgatttttcatattctttgatcttttcaccgataaatttgaagcctgtcagcgtgtcaaccgtatctaatccgaacgatgaagcgacggcgcggcccaattcgctcgtgacaatcgttttcatgacgacaccgttttcaggaagggcgccctgttttttcttctcggaaagcaggtaatgcaataaaagcgcgcctgtctggtttcccgtcagcactgtgtacttgccttcgctgttttttacggcaatgccgagacggtcggcatccgggtccgtagcgacgagaatatcagcgttttgttcttctccgagtttaatggcatattcgaatgccgcgtgctcttccggattcggcgatttgacggttgaaaaatccgggtccggcagctcttgctccttcacgacggtgacgtttttgtaaccgagtgcttcaagaccgcggcgcaccggtttatttgccgtgccgtgcagcggagtgaacacgacgctgacatccacttcagccgaaagttcgggatgtacggagatggaagtcagttcttcagtatacggtttatcaatttcttcaccgattattttaatcaaacctttttctttcagcgactgttcatcttcaacttgaatcgttaattcattttctatggcattcacttccgcaatgacgatgtccgcttctttcggcggcagctgtgcgccgtcatcgccatacactttatatccgttatattcaggcgggttatggctggccgtcacgacgataccggcataagcgttcagctttctcaccgcaaaagacagctcaggcgtcgggcggagctcatcaaatacgtatgtttgaatgccttgggaagcaagggtttttgcagcttccatcgcaaactcaggagatttatgacgggagtcgtatgcgatcgcaacccctctttttttcgcgtcttccccctgtttcgcgatatacgccgcaagtccggcggatgctttgcggaccgtgtaaatattcatcctgttcgtacccggcccgatttctcccctcatgcctcctgttccgaactcaagatttttgtagaaaaaatcttccagcagctgctcgtttccttctgcgtccgccaataattttttcaattctgaatctaattgttcggcctgattccagcgttcgtaactcttactccaactcatgttcgtcctcctataatttcagcttatgaccatattttaatatgaagcggctgcccgtgtcacttgataacttaaccaaatgctttatgtaaaaagataaaagaagggctcatgccttttcggcacagccctccggttattattgttcgagcggaacaaccgcgtcgtgcagcagcgtatttaaccactcagtgtgtttttctttcgttttgtcattccattggaatcggtcgctcatgtaatcaatcacggctgttttatacgtttgcacccatttgatgtcgaagaacagtcttcccgttctgcggacgaagaaatcggcaggtgtcgcagccatttcttcttcgatgctgtaagccgcttccgccagaatgtgaaccggaatctggcgtttttccgcttcgtctttcagaccttcaatccggctgaatacattttcaacgttagagccgtatctgatggctaactgcttagcggtttcctgtgataaaccgattttcaagccgtcttttgtctttgcttccacaaatgactcgaagtttttagagccgccgacatgtccgccggaaatcggcatcgtcttcgtcttgcagccgccgaagtcctggccgccctcttctttcaagcggtcgcggacaagatcgacaatgtgctcagccattttacggtagcccgtcagttttcctccggcgatcgtaatcaggcctgattgagatgtccagatttcatctttacgggagatctcagacgggtctttcccttcttcgtgaataagcggtctgaggccggcccagcttgattcaatatcgtccgccgtaatgttcagttccgggaacatataattgatggagctgacgacataatcgcgatcctgcaccgtcatgcgcgggtgctcaagtttttgtttgtaaaccgtatcggtcgtacccacgtatgtttttccttcacgcggaatggcgaacaccatccggccgtccggcgtatcaaagtacaccgcctgtttaagcgggaatacggattggtcgaatacgagatggaccccttttgtgtgctgaagatgttttccgcttttgctgtggtctttttctctcagctcgtcgacccacggacctgtcgcattgacgatttttttggcgtaaactttgtattccttgcctgacagcagatcttcaattaaaacgccgacaacttttcctttttcataaagcagttctttcactttagaatagttgacaggctccgcaccgaatttaacggcttctttcatgacttcaatcgtcagtctcgcatcgtccgtccggtactctacataatagcctccgccttttaagccgtcttttttgacgagcggctctttttgcagcgtttctttagcagacagcatgcttctgcgctctgatttttttactcccgctaaatagtcatacacacgcaggccgatggaagtagagaatgaaccgaacgtgccgcctttatgaaacggcagcagcatccattccggcgtcgtgacgtgcgggccgttttcgtacacgatggcacgttccttaccgacttctgcaaccattttgacttcaaattgcttcagataacgcaaaccgccgtggacaagctttgtggatctgcttgatgtgccggccgcgaaatcctgcatttcgctcaaagcgactttcattccccttgaagcagcgtcaagcgccgtaccggcacccgtaatacctccccctataataaacagatcgtatgtttttttagtcatgtcttccagcatatgatcccgttccaaacttgaaaattggtgattcatcattacgtttcctccttgttgtcacggtatagaaaaagagaccacaacagccaaagcgcagttatcactttggtgctgtggtctctcctcatctcaggaccgttcctattaacttgttttcagtataccacatttttatcttatttaaaagccatagctgcatttactgcttttttccatccgccgtacaattcatcgcgtttttcatcttccatttccggtttgaattgcttatcaaggttccattgatcagcgatttcagtgctgtccttccagtagccgacagcaattccggctaaatacgcggcaccgagcgccgtcgtttcattaatttccggacgttcgaccggcacatcaagcaagtcgctctggaattgcatgaggaagttattttttaccgctccgccgtctacacgcaatgtttttaaagagatgcctgaatcagcctccatggcatcaagcacatctttcgcctgataagcgagagattcaagcgtagcccggatgaaatgctccttcgtcgttccgcgtgtcaggccgaaaactgagccgcgcacgtcactgtcccagtacggtgtgcctaatccgacgaaagcgggcacgacataaacaccgtcagcggaatccacacgctctgcgtatgtctcgctttcttttgaatcttggaacatccgcatgccgtctctcagccattggatagcagaacctgcgacaaagatgcttccttccagtgcatactcgacttttccgtctaatccccaggcgattgtcgtcagaaggccgtgatcagaagtgatggctttttctccggtattcatcagcataaagcagcctgtgccgtatgtgtttttccccatgccttcttcaaagcacgcctgaccgaacagcgcagactgctggtctccggccgctcccgcaatcggaatgtttttaccgaagaaatgataatcaaccgttttcgcgtacacatgagaagacggtttcacttccggcagcattgatttcggcacgcctaaaatatcaagcagctcgtcatcccattttaattcatgaatattaaacatcagcgttcttgaagcgttggaataatccgttacgtgcgccgcccctccggacattttccagatgagccatgaatcaatcgttccgaatagaagatttccgttttccgctttttcccgcgcgccttctacattgtcaagaatccatttgactttcgttcctgagaaataagggtcgatcaaaagtcccgttttttctctgaatgtatcattatatcctttttcacgaagctcttcgcaaatgccggatgtttgtctcgattgccagacaatcgcattgtataccggctttccggtatctttatcccatacgaccgtcgtttccctttggttcgtgatgccgatgccggcaatttgatcagcgctgattccggactcggaaatcacagtcgcgataacggcgagcaccgatccccagatttcgttcgcattgtgctccacccagcccggctgagggaaatgctgtgtgaattccttttgagcggaatgcacgatttttccttctttattaaaaagaatcgctcttgaacttgttgtgccttggtcaattgataaaatataggtctccatgatgccgctctcctttttaaatatattcagaatttgataatgttttccgtgattgagatttcttggtataaatatagagtatgaaaagcactacaaccattataacgcttacaaaccaaaagctaggtgtcacatttcctttaaacgcggcattgtaaaatacgccgccgaacgcaccgcccatgatcggaccgattacgggaatccaggcatatttccaatttgaaggcccttttttcgggatcggcagaaaggcgtgagcgattctcggccccaaatcccgcgcagggttgatcgcatatccggtcgtccctccaagagaaatcccgatggcaacgatgaggaatccgacaatcagcgggttcagcccttttgtaaattcattcgctccgattgccaaaatgccgagcacaagcacaaacgtaccaatgacttcacttatcatattcccaaatgtatgaggaatactcgggccggtcgagaaaacgcccagtttagcggccggatcatccgtcgccttccaatgcggcagataatgaaggtacacaacaaccgcaccgatcattgctccgatcatctgtcccgcaatataaacagggacgtctttccaaggaaagctgccttcaagcgcaaggcctatcgttaaagccggattcaagtgagcgccgctgatgctgccgacggcatatgccgccatggctactcccaatccccagccgaatacaataacaatccatccggattggtatgaaagcgatttctttaagttgactcccgcacaaacgccgccgccgaaaataacaagcagcattgtaccgattacttctccccaaaatgctgtcatcatcattcctcctaaatgacataatagcaggtttgacagagttatagagaataaaaaacccacaacaaaccgctttacgctttattgcttccgtaaagagctgttgtgggtctccgggtctccatcacatagtattaacctaggtctattgtaacaatgggtgtaagcggtgtcaatctttttttgtcatagaatgttcatatttagcccatagttcggtgtctgaagtcgtcacggccgtggctcctgcctgcaaggcgttttcaacgtcctgctccgtgcggatgaagccgccggcaaaaatcggaatccccgtcatttctttaatttctctgattaaagtcggaacgatgcccgggagaacctcgataaagtcaggcttatgctttccgacgaattccatgcttttctccatggcgcttgtatccaagagaaacagacgctggatcgcgtatattttcttttgtttcgctttgacgatgactgatgatctcgtcgaaatgatgcccgcgggccggatatcctggcaaatgaactccgcaccgtattcatcatgcttaatgccgtggattaaatcgacgtgaaccatcagaagttttccgtgtttttttgcttcattcacaacaccttttaattgaccgaggtggatatctaaaatgacgccgtataagaacggactttctaaaaatgcatcgaattgcttcatgttccggattgccggtagaatctgctggttgtgaaaactcatgttttactcctttacattaaaaatcaatgctcagcacgctttccttgacggtcgaaatgatgaaagagagctcctcgtccgacaggcaaaaaggcggagacagctgaatgacattattatatcccgctacagtatcgccatttttcccgacaagcaggcctttttctctgcacgcggtgatgacgtgctgcacaagggcggcatcagcgggttccttcgtgactttgtccttgacgagctcaatgccggcaagaaggcccttgccccgtacatctccgaccgccggatgttctctgagcggctcaagctcacggagcagcctttctccaagctcccgggagcgggcgatcaaattttcgtcctccatcaattgcaggtttttcaaggccagggcgcaggctgccggattgcctccgaatgtattcacgtgccggaagcggccgtacggctcaccgcccgaatacgcctcaaaaatctcccgttttactgccgttgccgacagcggcagataagcgctcgtaatgccttttgccattgtgacgatgtccggtgaaacgccgtaatgctgaaatccgaacggctctcccgtgcggccgaaaccgcaaataacttcatcactgatcagaagcgcgccgtggcggcggcaaatgtcctctacctttgccatatacccgtccgggggcatcagtatccctccgcctgtaataatcggttccataataacgccggcaatcgtttcgcttaactcccacgtcatgatccggtcgatgtcatgcgcgctttccaatgtgacggcatcgccgggattccgataaagatcaggcggcgccgcgtgcaaaaaaccttgtgagagcggctcatatttatattttctctgcgcctggccggtagcggcgagcgcccccatcgtattgccgtgatagcctctgtaccgggagatgaatttgaagcggctgtgatcgccgttttcaatgtggtattggcgggcaattttgaacgcggtttcatttgcttccgatccgctgttggaaaagaagattacataatcgccgccgagccattcattcagtttttccgcaagctcaatcgcgggttgatggctttgggtcagcggataataaggaagctccttcaattggctgtaagccgcatcggcaagttcctttctcccatatccgatattgacgcaccacaggcctgacatgccgtccaaataccgtctgccgtcaatgtccgtaacccaggcgccttcccctttttggacgattatgctgtcatccggctccgcccctttcatcgcgtgccaaatcagctctttatccttttgtttgagtgactgatttttttgtacatgttccacaccgctcatctccctttcaatatcattgcactgtatcgaaagctgcccggcttctgacgccgattctcttggtgaagttttcctcttaataagaatataaaggcgcggcatgggcgagtcaataaagcggcggcaattaaaaaaacgctttctcccagaaagcgaaagggctacaagagcatatcccgaaaccggggccggtgcaagtgtttttataaaaaaacccgccccttaagcggagcgggcgtttttttatttcagatgcgtaatccggtaaatgtctttgcgccggtctttcagctggcgcacggttccgttttcacgctgccttcttaagatttcaaggtccacgtccccgatcacgaccatttcgatattcggattcgtttcaccgacgattccgtctctggcaaattcaaaatcagacggagcaaaaatggctgactgcgcgtattgaatatccatattttctgtttgcggcagatttccgaccgtacctgagatgacggtgtaaatttggttttcaaccgctctcgcctgagagcagtaccttacgcgcaagtagccttggcggtcttcagtgcagaacggcgtaaagataattttcgccccttgatccgcggcaattctcgcaagctccggaaattcgatatcgtaacagatctgaatggcgatctttccgcagtccgtatcaaatacgcgcaccctgtctccggcgctgatgccccaccatttccgctcattcggcgtaatgtgaagcttatattgtttttcaatcgtgccgtcacgtctgaataagtacgcgatgttataaattttaccctcttcttcaacgaagtgggagccgccgatgatgttgacgttatatttcaccgcgagatctgtaaagaggctgatatagtcctcggtatattcggtaatcctctgaatggccagactcggagaacgctcctcgaggaaagacatcagctgcgtcgtgaaaatctccgggaacaccgcgaaatcagatctcgcatcggaagccacatcgacatagtattcaacctgattggcaaattcctcgaaggagtaaatctttttcatttcatattgaatgacgcagatgcgcaccggaaatgccgatttgtaatagcgcttcgattgcggcaggtaatcgacattgttccattgcattaatgtcgcatatttaatggacgcggtgtcatccgggagataattcggattgatccgcatgagcgtaaatccgttcatcagctggaaagaaagcaccggatcataaatctgatggcgcgtcacctgttcgacataagctctcgccgtcatttcttccgcatacttatgataattcggaatccgcccgccgataataatgcttttcagattcaatcgtctcgccaagtcttttctcgcctcatacagccggtgtccgattttcatccgtctgtattccgggtgaaccattacctcaatcccgtacagattcaatccgtccgggttgtggttcgtgatataaccgtcgtctgtaatgtcctgccacgtgtggcggtcatcatattcatcgaaattgatgatcaggcttgagcatgaaccgataatttccccttcgtactcggcgcaaaactgaccttccggaaagtgcgcgagatggctgattaaatgctcaggctcccacggctccatccccggaaaacaatccttttgcagctcaataattttgttgatatctttctcttccatattccgtatgaccattttcttttcaaaacgggtcagatcaagtttctcagacaatgctgcttccccctgccggttcgttttgatcgttcaatcgctgtaagagtaattcaagttccatttccgccatcgattccagtctgtgatcgtattcttcaaataacagggcgcttgttaccttattcggcacgatgacacatttcatgccggcccgtttggctgcgatagagccgttgaccgaatcctcaaaggccagacattcagatggttcaacgcctaaatgttccgcagctttcagatagagctccggattcggcttcacttcttctacgtcgtcagccgtctgaatcacttcaaattcatcaaacaggcctaattccttcagatggcccgatacccatttgaaatctgagctggacgcgagccccactttcaatcctaattcttttgccgcggctaaataagcctccaccccgggacgcgccgtttccgtcttcatccgctgttcgaagcgcccgcgcctgatcgccgtcagttcatcatgatcgagctttcttcccagctgctcctctaaatatgcgaacggcttaaaccccgcggccgttccgatcacctttccccagacggataaaggcaatgttgaaccgtgttcctcaaacatttcctgcagcacttcatattcatgggtttctgtatctaaaattaacccgtcaaaatcaaagattaatgcttttatcaatggttacagctcctttagctaaacgtactgacctatgtatacactataccgtgaatttctttcgcgttcaaaatgtaacattctcacggaaagaagagcctgcatgagtgcaagctctcttcatccgttactgtgtgttttgactggaaatattggaaagagctgctcccgcagactcatttgaacgctgatcgaccgctaagtctccaagcgcaacgatcccgaccagatgattttgatcgacaatgggaaggcggcggatttggtgttgggccatcagatgtgacgcctcttcaagactcatttccgggtttccggatacaactgcagaagacatcacgtgtgaaacaggtgtttggccgtcgcggccttgagccgttgttctcaatgcgatatcacggtctgtcagcattccttttaattcccctccgtcaacgacgggaattgctccgacattatgctggtgcatcagcgcagccgcttcctgaatcgtttgattgggagaaacggtagccacgtgggtagtcattgattgtttgattgaactcattgtaaagcacccctttcgacatttattatgctcggggatttgtctcattataaagggagttagaggaaagaaattgtggtatcatgtcaaggaagcaaaaaagagcctgtcaaaaggctctttatacccgtcagatcagccttctgtgaccgcaggcttctgatccggcccctgtctcgaaatcatcataggtaaagggaaaattcattccgcattcattcagcaaagcgcaatttttatcaaacagcgcccgctctttgacgtcatataccgggtgcggctttgacagcatgatatgtaccgtttgcagacaagccataatttgaaacgcttcttttaaagttccttggtaacgttggttttgtaatgataatacgcccctttttttaaagcgctgaatttccagttcggagaaataaagaggaaagacattttgaaacaattcagaggaaagctcttgtatcgcgctttcttgtccgtcagtcgctgcgttcacaattctcacatcaatcacctttcttgccatgtgaatatccttaatctttatcaagaatagcatagaaaaaaacgcgaaagctaaggtaagtgtttcctattgaaacagccgctttccgcttgaaaaggagctttatgatatgaaacaaaatgaccgcggtctggaactcctgattacggaaaagcacgccggacaatggctgttttcagtcctgaaatctgaattccaggcgtcaaaacccgtaattacggaatggatgaaccaagaaagcattcaggtgaatcgaacatccccgaaaaacaacatcatactgaaaaccggagatcgcttattcattgatcttcaggaaaaaacgggttcttcggtgactccggaatacggagagccggacattttatttgaggacaatcatatgctgattgcaaataagccggcgggaatgccgactcatccaaatgaagagggtcagaccggcaccctcagcaacctgatcgcttaccattttcaaatcaatggcgagcaggcgaaagtgcgccacgttcaccgtcttgaccgtgacacgtcaggcgcggtcgttttcgcgaaacaccgcctggcccatgcaatccttgaccgtcagctcgaaaccaaaacattaaaacgcacctatatcgccgcggcggaaggaaaagtcacgccgaaaaaaggcacggttgactcgccgatcggacgcgacaggtcacattccgtcagacggcgcgtctcacccggcggacaagccgccgtcacccattacaaagtgaaaggctatcatcccggtgcgcagcttacattggcagagcttgaactggaaaccgggagaacacatcaaatcagggtgcatatggcaagcatcggccatccgttggcgggcgatgacctgtacggcggaagcaggacgctgtttcacaggcaggcgcttcacgcaaaaaaagtcagtgtcgtccatccgatctcaggagaagaaatcgttgccgaggcgccgatgccggctgatctggctcattttaccgaaacgtatttttcttaaaccgggtcggcatatataatatatcgtttcggcgcatttccaatgtaagaaaacggatagcaagtggtcaggatcagttcctcccgtttgtgctgaagggtgatgacagatgtatcatcccggctgacaatttttgtacggctgattttataagaaaacgtgccgtaagacaaaatcacgttcagtctgtctccttttttcaattcgccggtcctgcggaacaccgtgtccctgtggccggataacacaatttggccgtgatcgcccggataatagctgtccttataatgtccgacgccttttgctaaatcatctgcgtcagtcccttccacgatcgggagctcagcgtcgatttcagggatttctaaaatgccgcttgcctcacccgtttcggggtgaaattcttttttgcgctgtgtcagcacagcgctttttgtttcgttcttttccaagacaggttctgttgctttttttgcttcttcaagcgaatggttcgttttcatatgtgaatcaatgatcttccagcttccgtaacatgtgatgatgataccggcgatgatgacgaaaagcggaataagtttcagtttgttcatcgtgtgcggattccccttttctttctgaaaagccaatatacgccggcacccgtgatcaccagaccggccaatgccgtctgatggctgcccgctgaagtatcaggcaatgggcggcctttttgtgtgccgctttcagtctgttttgtgctttgttccgaatttgcggcagacgccggacgggattcgggaattgactgcactgtatcagatgctgtttcttctgcgacaggacgttcaggttttttggtttgatcaggctgttctgccgcatccggttttttagcgggtttttccgcttgaggtttttctcctttatcaggcctggtgccgcccggtgtttccccgcttcccggctgattgccggtgtcatcaggtgtttcggcggctgatgccgtgcggatgcggccgtcggtttgataagaaatcggtgcggaaaagcttttgacatagtctactgtcgcttccaaatcctcaggccccgtcaccggattcttgccgagtttcccgatcggaccgtattttgcccccgctgccgtcgccataaattgattgactgttactgtatatcctttttcgggctgtatgtctgtcccgtccgccatcttcatatcaaccgcttgtccggtttccgggttccatgtataggaaaatccgctgatgctgtaatccggtccgtacaccggagaaatttgcgcgttaatgatctcccgcaaatcttttcctttgatttcaagcttcgtcagcacattgccgaacggctgtacattataaaggtctccccatgtaatcgtccctttttttatgccgtcccggatgcctcccccattcataagcgcaaaatcggatttcatcttcgctttcataccgtcggcaatcagatttccgagcgccgtgtcgccgtcatttgaatacccgcccgttatatcatgggccgcttccccgaccgcttcgctgataatcggtttcactttctcttcgtatttgcttaatatgcctgccgcaaccgggtcaggcttgattttgctttgatcgatatattggatttccgctgattttttcacgatatccttcgactctttatcaagttcaagatcggcgattccgattgcttttccgtattcaaatgcctgcacgatcagcttgccgtcgatttctccgtttacgactttatgattgtgcgcggcgaaaatcacatcaatctctgagtctgttccgcttgcaagctttgcggattctcccgtgatggctgagccattttgttcagcagacatatgggcgagcacggcgattgctttaattccttttttcttcaggtcagcggcggcttcattgacggcctttacctcatccgtaaacgtaatatttttaattccgtccgggatgaccatgcctgccgccgatctggttacaaccccgataaatgcgaccggaattccggaaacgtatttaatttcatacggcggcagaaaggactcccctgacttcaatttacagttggcgcagacgagcgggaaattttggccgtcataaccgcttgtccccttaccgtccggatgatctcctccattgatgatccgtttaagctcattcgttccttcatcgaattcgtgattgccgacagttccgacatcaaaaccgatgtcttccatcaattctactgtcggttcatcctgaaaaagggctgacacgggagagctgcccccgatcatatcgcccgcatgcacgacaaaggcgtgttctttctcggctttcgcctttttaatgtacgctgtggcgtagtccatccgcccgaacgtgccatccggtttaccgtctccgttaaggtcaagctcatattgctgatcaatttttccgtgcagatcattcatgctgatgattctgagtgggacacggccggagtcttctgtctgctgttctttatacgctttatccgtgccggcttcattcagtgatccggcttgtccgattgcttccgcatctttcacgctgaacatcaaaaaacaaaccgtcagcaaacagcacgaaagacgcatacccctttttttcttcattcatttcccccctgtcttctaagaaatacgttagcttattttcttaaaaatcacatcacttttttgtaaagattgtcttcgccggcgcaaaatagtaaataatccccacgtaacgaaacaggacttgatgtataacggatcggcttttttcacatcttaatgatgatttgacatgaaggaggaaaacaaccagtggaacagcagcagaatcagcagcagccgccagtaaatcaagggatcccgggttcaccgcaagtgaatcacggaggacatgagcttttcgatatgcatgaagtgctggccggaacagtcggcgttttggatcaatttatgatgctcagacagtttatacaggatcagcagctggccgacatccttgaccgccagtatcaattcattctcggactctataatctgacggcagaatgctttaagaccggccaaaagccttctcaggaaacgtcgacatatatgatgaaggaacagaaccaggccgtctacggtataaaaccgactcagccgaaaaaaccgaatcaatcattaaatgatgtcaaagatctcgggatcagcggccatatgctcggcctgattaaagctcaagcttctctcttgacgatgagctcgcttgaaatgaccaatcccgtcactagaagagtgctctccgcccaaattcagcaatatgtcgaaatggcgtatgaaatcttcttataccaaaacaaacacggttattatcaggttcctcagctcaatgcacaagatatgcagaccatgctgaattcatttgcaccggcccagggacagccgcaaatgcctccgattaaaggacaaatgggacagcagcagcaaaacctccattgattaaaaaacggcgttggaaacctgactctccaacgccgttttctttttttcatatgcttttgtgaaatcatgttcaaatcgtttcaggctttctttcgtagccgcttcaaagcctttttcaaaatcctgtgtttcggcggttttattgataatggttaagataatgccttctccgaatgtttcggttaagtcctttatcatatagaagctttgcaaatagacatccgtttcatattccatacgcgatttctgccattttcggtcggtcgttaattgatcaaacggcacgacggaaaatgcaatcggatcaatgactacatcataatgcgcgacccactcgctcaacccctcatgaaaccaaagcggaaatacagacgtatccgtccccaattgccgcgttttttgatgaaacgcatagtgtgtatattcatgtataatcaattgcttatacatgaaaacggccagctcatcttttttcaaaagctgttttttctcttcaggcaaaagccccatcatctgctcctgttctgaataaaaaccgactacatttttcaatcctgaatattgctccatttcatcttcatccgaaaagaaaatgagttcaagcggcgctgcacctttataaccgacaatgatttgattgatacgctttgcgtggtccagcgtaagcttggtcagatccaagagcggcttttcatccgccgtatagtaaatcgctgtatgtttgtaaatttctttattcatgtgttcagtcacttgttccttcgtcggaacagagcggctgttttggcctgacaggacgtacatcatacttactgaaacggctgaactgacagccaatatgacaaggactccgcacaggatcagagtgaatgccgcccgtttccccatgccgtcacgcaaacaagctcccctccccgatcctttcattttcatctcattctttactttatgctcaggagcgctgggtcgtgacggcagataaaataaaaaagccgcagcaaatgcggcttttccattcatttatttattggggtttgggaatacacgctgcaccatttggccgaattcatcaaacagaccggatacaggatgtccgttttggattcgttttccgtagccttgcatgcgttcaacgaagtccgggttcgctgatacatatacagtccggacatgtttatcggctgatttcaccttatcggtaatcttatttttcaaatggttggcgatggcgcctttttgcccgtttgtcaaaacaacggcaacatatgcgctgtttccggcaacgatcacagtcgcatttttaacctcttttaaatcagtcaccttgtcggcggctttatcagccactctcaggttacgattgtcattgtgatcggtgttttggttatgacggttcactgtattcatatttgtcgcaccgtcgttaggcgtgttgcggtaatttacattctgggtgcggttgtcatttcgttttccttctccttggttccccatactgcaccctgcggtaatcagcatcggcagaagaagggcagagataactgcttgtttttttatcatgtgaattcctcctttctcactttacgtataggtttttctattcggcgggatttatgcacgccgtttgcattctgaacggtttggataaatatcagaaggaaagggaaaggtaagcgtaatcaattgaatgaggagggatttaacttgttcagaaaaaaaagcggtatcagcccgacagcgctgctgatcggatcatcgattctgattgcagctttatcacccgaaatccgccggaaaatctccggaatggtttcaggcagaatgcagcataaagatggcacacactccatgcagcctgctgacctgattcaacaggctttcggcggggaatccggcggacagcagcacgcagacaaagcccgacattcacaaaccggctcattgcagcctgccgagctgatcaaacaggctttcggcggcgaatccggcggacagcagcacacggacaaagcccggcattcacaaaccggctcattgaagcctgccgacctgattaaacaggctttcggcgacgaatccagcggacagcagcatgagcagacttcccgcaatcactccggctcatcccatacggacagacaggcagaccgcagccgcagtaaagaaacttcgccgaagcctcactataccgagccgattcacttcgaagaaagcgcggtaaatgttttaaatgacagcaccgtgatgaatatgctggaagaaattgaacccggaaatcattagaaacgaaaaaaaatccttcattcgttcaacgatgaaggatttttcgttttagcgctatctgcttttttattaagcttcttcagtttcaatgacgattgtggaatcattgtacaccgcggtatcggtttccttcgtcattttacttgttaacagccctgcggtcatactgccgctgacatttaaggcggtgcgccccatgtcaattaacggctcaattgaaatgagcagtccggcaagcgcgacaggcatgttcaaagcggataggacgagcagagccgcaaatgtcgcgccgcctcccacgcctgctacaccgaatgaactgattgccacgatggcgatgacggaaatgataaatcccggttcaaacgggttttgccctactgtcggcgcaatcatcatcgcgagcatcgccggataaatgccggcacagccgttttgaccgattgataagccgaatgaaccggcgaagttcgcaatgccttccggtacgcccatgcttttttgtgttttaatattgagcggcaaagcccctgcgcttgaacgggacgtaaacgcaaacaccataaccggaaaagcttttttcacgtatgtgatcggatttaaaccgctgaacgtgatcagcagcaagtgaatgataaacatggcgataagcgcggcgtatgaagcgatcacaaacatccccagtttcgcaatgctgtcgatgtcgcttgtcgcgatcgttttggtcataatcgccaataccccgtaaggcgtcagtcttaaaattaatgtcacgacgcgcataataatcgcgtaaaccgcatcgacaattccgctgaatgtcgctgcgtgctccggctgcttccgtttcacgcccagaaaagcgatgccgaggaaagcggcgaaaataacgactccgatggtggaagtcggtctggctcccgtgaaatcaagaaacggattccccggcagaagctcaacgatttgctgaggcagcgttttggccgtcatatcctcagatttttgctgcagctcctgaccccttgataactcagtgctcccctggtcgatatgaacggctttcagatcaaaggaaagcgccgaaacaattccgactgccgcggcaattgctgtcgtagcaatcaaaattccgatgatcagtccgctgattttcccaatgttatgggtcagtttaagcttcgtaaatgcgccgagaatagaaataaagactagcggcatgacgatcatctgaagcaatttgacataaccgccgccggcaatattaaaccaatcggccgtttgtgtcacgacatgtgaggccggcccgtaaatcaattgcagtgcaaaaccgaatacaatgcctaatccgagtgcggtaaagacacgtttagaaaaggaaacgtgttttttttgcatcacaaacagacctgctataaacaaaaacaaaataaaaacatgtaagattacaaataaattctccaaaacaggtaaacactcccttgctcattatccttaaacactatattacatcaattccgatcggtcaagtaagaattgacaatatatgtatttttattgatttttctcttttctttccatcctttctttagtaacttatataagggtgattgttatgctgaaggaactgtttcttaatttgacgattttaatcacatttaattatctcttcaccgttctttttaaagagtcgctttcacataaagaagaccgtccggtgtttcaattactgaaggggacggtctgcgggcttttaggggtttttctgattgctttcggcttttcttactccgattccatcattgatctcagaaatatccccattatcatcgccgctctttacggaggctgggtgtctacagcagctgcctttatcattatcgtggcaggccgtatcctgatcaatttcaatgccagcgccatttattctatcgccgcggtcggcatgattgcgatactttctgtggccgtattcagaggaaaaaagccgaatcacaaaaatgcgttcgttatgctgctcttttcaaatgttattatcaccctgacgctgctgttacttatgcctgaacagcctgccggggccctcgtttatttttggctcatttctaccttgggcggaatgctgtcgctgtatatcattaaacacgaagccgatgcccgccttttgttcaagcaatacaagtttcaagcgaattatgattttctgacggggatttttaataagagaaaattcgaggaagtctcgcgcgttctgtacgatcgggcgtctcaatccccctcgtctcagctcgcgcttatttatttggatattgatcactttaagcagatcaatgaccaatacggccattatgaaggggaccaagtgctgaaggaactgggggcgcgcctgaggttcttactcagcagttctgatccgtcagcccgtatcggcggggaagaatttgccgtgcttatgcccaattgcacgtatacaaaagggcttcacctcgcagaagaaatcaggcacacgattgacgcgaacccgattctgctgacgagcggagatacaattcccgtgaccgtttccctcggcatcgcgcattatccgacaaatacatcggatcctcagacattgcccctgatcgcggaccggatgctgtacaaagcgaaaacatcagggcgcaatcaagtgtgcagcactgaaaaaaaagaatgatcgcccgaagaggaaatcattctttcttttcagtgagaaaaccgcccctcaggaaaacaggaatcaggctgccctcatattctttttcaataaacgccgcggtatcatctgattgatacaaagacaggagtttttgcatccgttcatcatctttattctcagctctgacggcgatcagatgaatatatgcttccttcatttgcgccgatcggatcagcgcgtccttctccgcatgaaatcctgctcttttcgcctcgctttgactgagaactgctgcgtcagcatgttccgccgcctgataggcgttcttttttgtttccgtttttaaggtcagatgcttcgggttgtccttgatcatatcagttgaacccgtaccggtgaatccctttttcaatgtcatcagtccggcctcctgcatgagaaaaagcgccctgccgaaggccgccgcttcaccaggcacggcaatgaccgctccgtccggtatatccttcagccgtttatgttgcttggaatacacccccagcgatgccgcatatgtcgttcctaaaggagccagcttctttttcatatgaggcggcaaagattgaaaataagaaacggattgaaacgcattggcgtcgagatccccaccggcaagcgccaaatcggcctcggcataatccgaaaacgttaccaaagaaagctgcaatccttcctcaccggcttttttcgcgacaaactcccagatcgattgatcagattcattgattccgatagtaattgtccggttcccgtcaggataatgacatgaagtaagtgacatgatcaaaatgaaaagaaacagactgtttataagccgcaggttcaagttgacctactccctatctatttttatgtacagaggcggcaccatggtattcgggctcatgattacatacaataccgattaaaaaaaaggttgtcaattgcttccttaagagaccgtaaagcggtttttatcagctgaaaatgggctgttctagtctcaaatcagatttccgtatcagagcgttcccctcttaaaacatgttatttcgaaaaaagttacatttagcagttgttttttcttcgaattactggtagagtaaaggtaattatttttgttcgaactatctttaagaagaaagttttgtaagagttttcgtcttggaagtttgttttagagcaagaatagtgaatttaagcgttatgtcgctttaggaggaaatttcatgttagaaggtaaagtaaaatggttcaactctgaaaaaggattcggattcatcgaagtagaaggtcaagacgatgtattcgttcacttctctgctattcaaggcgaaggcttcaaaactttagaagaaggccaatctgtttctttcgaaatcgttgaaggaaaccgcggaccacaagctgctaacgtaacaaaagcataaattgtttaaaaaccctgccggtgtacgccggcagggtttttttcatctaaaacgaaaagctgttttgcaaaggcaaaacagcttttttatatcaggtggcaatatcgcgttttaagaagacgccgaatgcgagcgccagaaaaatgatgaagtaaatcacaagcatcacaaccgaaaatgtcatcgtcatcccctctactaaaggagtcccgttcatatattgcgacaaatccgtattggcgaataaaatatatttggtccattcaaatttcgtggcaagaaatacagtcgccgtgttccccataaccaatagaaaaatagaaaatccgaccgctaatgagctgttccggaataccgcagacagcataaacgccatcgtcgcaagcataaaagcggagacagattcatagacatatgttttagcgaggaaagcgatgatattttgctcaaaaacatggccgtctttgtatacgagatgaacatcagccgcagtatctccccctgtaccgaaaaagaccaatcccagcagagcggagccggcaaataaaatcacaagcatcagcagtccgaacagcagcaccgtcatatatttagaaagcaaaatctgaaaacggctgagcggacggatagccagcagcttgatcgtcccccagttgaactcattcgccacgatgcctgcggcaatgataatcgtaaacagcccggtcaaaaccgtcatcatcgaagaatcagctacgtatgaccacactgtgtaccctgtatcctcaggaatattatgatccatacggtattgatttatcgcgatattctgtttcagactatcaatgacagtctgatttccggtttccttcatctgctgtttcatttctttgttttcggcctggagctcctgtttccaattcggattggcttcgctcgaggtgaaatggtttgacagaagcgcaaaaccgatcatcgaaacgcctaaaattacaatcatagcccacgtgccgacgcggctgaaaatttttatccattcattatagatcagcttaaacatattgaacctcctctttcgtcccgccggtaatctccaagaaacggtcttccaaagattttgtcatgattttcacttcatataagcggatgttttcacggacgagcagtgatatcacatcaggcacttcctgttttgacagcctgatctcaatgccgtttgtcttcttcatacagtcaaactgactcagaacggccagagcctcttctctttgttcaatatggaagaagtatgtatctttatcctcttttccttcatcccttactttttgaatatcgacaagctcccctttttgcagaatgccgattcggtcgcacattaactccatttctgacagcagatggcttgagacgatgacagccattcctttttcacgtgtcagctttttcagatggtccctgatttccctgatgcccgcgggatcaaggccgtttgtcggttcatccagaatcagcaccttaggattatgcagcaggctttgggcgaggccgagacgctgtctcattccgagagagtaggtttttactttgtcatgtattctgtcctgcaacccgacgagctcgatgacctcatctattttttctttcgtaacgccttttaccatccttgcgtactgctgtaaatttttatagccgctcaggaatttgtacagctccgggttttcaacgatggctccgacgtgcctgaccgcttttgcatagtttttcgtaatggattccccgcagattacgatgtctccctgagacagtttcattaatccgaccatcattctgatcgtagtggttttccccgctccgttcggccctagaaacccaaacacttcgcccgcccggacggagaagctcagatcatgaataatcgttcgtccttttatcgttttctttacctgttgcagttctaataccgtttccaattagaatcccccttctatttcgtgcgcctgcatgacgcttctgtaccattgcagcacggacattccttcctgttcccgaatttcttcgacctcgcgccgttcagcgattttcccttttatgaaaaccatcacttcgtctaacagcgtctcaatctcgccgatctcatgcgtggcaatgacgacgatctggctgtcaaaatcaatataagatacgagactgttgacaatcgattctctgacagccggatcaagacctgaaaacggctcatccagcagaatgacggatgcttttctcgacagggccaaaacgattttcagcctgccccggctgcctttggacagctcttttatcttccgcttcgctgaaagattcatttccgttaataggttatgtgctttttccagctgaaaatccgggaattgcgaatgataaaatgtgagcatatcaccgacggtcgtccgggcggaaaacatatcgtgttcggttaaataagccgtacgaaacagcatgttcctgcttactgcgcagtctcccatccggacggcgcccgatgtcgggaacgctagcccggcaagcattttaagcgttgttgatttaccgcttccgttcggccctaaaattccgtagattttacccggagacaatgaaaatgatacatcgctgaccgcgagcctgcggccgtatttttttgttacgcgttcaaaatcaagattcatcgtttgcttcctccgcatattgtttgatcccgtcgatcatttcctcaggagataaccccagctccgccatttcctgaataaagcgtttgaaaacgtctttagtcagcctgtctttcagctccgctttcagatcggacctttccgctataaaggttccctgtcctcttctcgtctccacgatccccagcctttccatttcactgtacgttctttgtatcgtattcggattcactttcatctgtacggccatctcccttacggacggcagtttgtcccccggtgaaagctcgtctcggatcagccggtaatatacacgatcggcaatctgcagataaatcggcttggatgactgaaattcattctccatcattacacctcaacctttcgattcagcagcatagaggccagcgcgagacagagcgccgcaagcacgatcactgccaggaagctgaaaagcgagatgtggacggccttcagctccaccgtccagccggtcaattttgtatagtgaaaatcaaaatccgcatacacttttaccggccataaatcatgttgagatgaagtgaaaggcgtaatgattttatcgtcaatataggtccagacaaacgcaagcacgatgcagatcacccaacggaggacgggaacatgttttaatgagtgaaaaacagtccaaaatacggccacgatcacagataaatacgctgaactgatcagcaggtaagcattcagtccggttaatgtgccggccaggggaatggtgtgttccagcgctccttttgcagaaagcatccggtacatccaaatgccgtaaccggtcagcgccagctgcccgatcaactgatacagcagtgaggccgtcagcttggaagccagcagataaaatcctccattcggattgtaaagccacagctgattttttccttctttatgaaggtgatagtacataaaaagcggcgctacaagaaattgaaaaaaccccattgccgtaaaaaagccgaaaatgacgagcggttctttctgacgggcagcgatgacgtgggctgcaaacgcccagcaaatcatgccgcaaagccacaccgcgagccaaatccatgaaactttcgcatcttttttcagcaaacctaaaaacgatgtcattctttctctctccattcggatcaagtgtatgagtaacatagtacactagatcatcacgtattacaatatcttcaataaaaaaaaagacaaatccgctcttacgcagatttgccttttcaattacttctttttgttttttaaggagagcagcgcatcacgatagctgctatcctgcattttgccgccgctatcaggatcgtttggttcctgatccgtctcagaagtcttaaacttctgaagcgcctgacggtacacatcatcgcccattgtattctttttctcacggggagattcagattttacaacgacgggagcatgctcggctgagcgctcctcggccggatcatgcttttccggctgttcggctgtagtgccgatcgcttctctcttttcttctttgacatcctgtcctgcagaagtgctgcggacattgaatgtgataagaagtgcaatcacaatgacagcagcaataaccgctataataatggccatataaccctctccttactgtcgtccggcagttagattacctgtgacttggctgacacgtctgccaagcgcacggcctaattgaaggccttcttccgtcatcagcacatcgctgtcaaccgggcatgtgacgcccgcaccgtagtaagagccgtacagcgcgttttcaggaacgttgccgggaagtccgacaacaatcatgccttggtgaaacataggagtgatcagattgtgcattgtcatttctaatccgccatgtgttgtcgccgtcgtacagaatacggcgccgactttatcaatcagctcgccttcagcccacagatagccgagtctgtcgatccacgcttttaagcctgaactgatggtgccaaagtgtcctgggcatccccagataatggcatccatgtctttcagcttgcggatgtctgcttgatcgacatggtcgatcaggacttcagcctcagcgttttctcgtgctccttcggcaatggcttcagcaaggtgttttgtatgttcgccttcactatcgtacactacgtaaattttcattcaggaaacctcccattcagatgattaagattccttcacttctttaggggccggaagcaatgacagctcctcttttttcttcgcccgctgtttgtctttccgtacgtcacgcaagaacaggctcaggactacgccgataaccgcaaagatcgtcgcccacataaacgcgtcattaatccccataacgttggaattaagtgaagctgttttgtagagatatgaataaacggtttgtttcgccgcatcaagcgacatgttcatgttgaccattaaattcgaaaccgtgctttggaacgactgcatgaagcttggatcagccgtgctcgttttatccgcaatctgcgaatagtgcattgtcgtacggttcgtataaatcgttgtgatcaaacttgttccgattgaaccgctgatctggcggagcgtgttgctcatcgccgtgccgtggctgttcaaccgtgccggaagctggttcattccggctgtcataacaggcatcatcaacagtgacataccgaatgcgcggatggcatagacaagcataatgtgcgtgtaaggtgtgtcaattgtcaattttgtgtactggaatgtcgttgcgaccgtgatgaccagcccgataatcgcaagcggtctcggaccgattttgtcaaacagaataccagaaatcggcgacatgatcagcatgacaatcgcgcccggcaatagcaagaggcccgattgcagcgctgtaaagccgactaagttctgcaaataaatcggaagcaggaacattcctgtgtaaagcgcaacggtaataatgatgttaatcacactggaaagtgagaaaatatcatatttaaatacccggaagtcgagcatcggtttttcagagcgcaattgctgaatgacaaacgcggcaatcgcgatgacaccgacaatgacggtagacagcacgatcggatctccccagccgtcgctgcccgcttcactgactccgtaaagcaatgaggcaaatccgacaatggatagaatcgcacccaagctgtcgagtttgattttttgcggttccaccaagttcttaaagaggaagaacgctatgataataacgattgccccgatcggaacaaggccgtagaacataatgcgccatgtgtaatgctcgatgatccagccggaaagagtcggtccgaccgccggagcaaacatcatcgcaagaccgaaaatccccattcctttccccctgctttcaggcgggaagataagcagaatggttgtcatgaccagcggctgcaggataccgccgccgaccgcctgaattaaccggccgatcagcatggttgagaagttaggcgcgattccgcagactaacgttcccgctgtaaaacagaacatggctacgagaaagaggcttctctgtccgaaccgggtaattaagaacgcagataacggaatcaaaacaccgttgaccagcatgtatccggtcgtaagccactgaatcgtcgtcgcactcacaccgaactcggtcattaagtgcggcatcgccacgttaagaagcgtttggttcaagatcgccaggaataacccggccataagcacaataagcaatgttttaggactttttacttgattatctgatttagccacctaagacaacctcccttcatggtttgatgactgatctgtattattcagagatttttacagatgcgttcataccaggaagcaccttgtcagatgggttgctgagtgaaattttaacaggaactttttgcgttacttttgtgtagttgccgcttgagtttgaagaaggcagcatatcaaatgttgaatttgtcgcataaccgatttcttctactgttccgtcaaatgttgtattagggtcgccgtcaacaattacgtctactttgtttcctacttcaatgtctctaatgtctgtttctttaatgtttgcagtgatgtaaaggtgtttcatgtcaatttcctgggcaattgtcgtaccggcttgcaccatttggccgtttttcacttcgtttttcacgattgttccatccatgatggcttttacgtcagcattttgctgtcctttgatttttgcaacaacgtcgtttttgcttacttctttcccctcatcaaggttccagtcagttactttacccgcagcaggagctgtgatagcagccatgtcgccggcaacttttgcttcatcggtttttacatagtgtgtgctttgataatagtagtaagcacctccgcctataattgcaagaacaacaatcaaaccgataatgttggtcagaattaaacgtcctctgttcattttgttttctcctttcgtttcttcctctatcattttgtggaatgatgataaaaatatgtggggatttttttattttccgtttttcactgcacagccgtttgcaagcttcgttaaactttccgcaagcttgcgcaggtactgcagttcaccggtattgagctgccggtataagaccgccgctttttcggcatattgaacagcagctttctttagaagttcttccccctcttcggttaactgaatcataacaacacgccggtcgtcgtgatagtcgctccgaaccattaggcggcgcttatacagaatatcggtcattctcgtgacagacgccggtttcagatcaagcgacaaagccagccttgaaagctgcgtgcttttgctcttatgtattttgaacatcagcagatactgcagcactgtaatatcaaaaggttcaagaactgtctccagaatcattttctgctttttgtaaatcgatctggaagtatcaaacagttgttcaaaactgagcaaagcgagctctgattcaatcaccgtattttcacctcattcccttaataatagttcacaagataaaatattaataaatgaaagaaggtttgtaaagagaaaagtttcattttttaaggattttttttatgccgttttttctctttatttttaatttaaaaaagccgggtgaagaaccgcggccgcacgattcttcactcggctttatatttcatacgatgctttgcttacaccggattcctcatttttaaaaaagcttttcagcgcttgaaatacgtctgatttctgtttcaggatgtagtatttaaatttatcatctttgacatttttataggcggacatgagggtggaatgcctgttatattgattgacctcaccgtaacagaacaggttcgattttttcatgatgtcattgacgagctttacgcaccgggcgttatccgaagtcaggttatctccgtctgaaaaatgaaacggatagatgttgtagcgggcggggtcatatttttcatcaattaattcaagagacttccggtaaacggaggaacagatggtgcccccgctctcgcctttcgagaaaaaatcttcttctgacacaaccttcgcttccgtatggtgggcgataaattcgatatcaaccgtttcatactttgtccgtaaaaatcgtgtcatccaaaaaaagaagctcctcgccatatacttttcccatacgcccatcgaaccgcttgtatccatcatcgctaaaacgacagctttcgattccggcttcgtcacatcattccatgttttgtatttcagatcttccggataaatagggtaaaacgacggcttgcctgtcatggcgtttcgtttataggccgacagcatagtccttttcttatcgatattccctgtcagcccggttttccggatatcattgaactcgatatcggtatggacgatattgtccctttccttttgctgcagattcggcagttctaattcctgaaacagcgcttcttccagatccatcaatgaaacttccgcttcataataatcctcgcctgcctgatcgccggctccctggccttttccggccccctgctttttatctgcgccgtctcttgcgacgacatcgccgacttcgctgtcgccgtcgccttggccgacatgtttatttttatcatagttataacggattttatactcatcaagtgaacggattgggatcttcactacatcttttccattagacataataatgctttcctcagttacgaggtccggaagattgtttttgatcgcttcctgcacttttttctggtggcgctgctggtcatcgaagcctttgcgatggagggaccagttttcctcagaaatcaaaaaatggccgctgtcattttgggacatgaattcccctccttaaccatttgtggtcgtgatacatacgtattccggcttgtgccagattatgaaacaagtctttcgaaaagatttatattcatcatatgcacatatgcacgtttaattgacaaactatttagaaaatgggacaaaataacccgccctattcggacgggtcacgttgcttatcggttcagcaggctgccgacatatttcagcagctcattggcgctcgtcgagttgtagccgtgctcatcaattaaacgggccacgacttcatttacctttttcagctgctgctcatccggcgtttttgttgaggtcgtaattttaacgacatccttcagatcagcaaacagctttttctgaatagcttcacgcagtctttcatgggaattgtaatcaaaccgcttgccttttctcgcataggccgagatgcggattaaaatttcttcgcggaacgcttttttggcgttttccgaaatgccgatctgctcttcgatggatctcatcagcttttcgtcaggattcatttcttcacccgtcagcgggtcgcggagcttatttttattgcagtaggcttccacattatctaaataattgtccatgagagttttcgcggattcttcatatgaatagacgaacgccttctgcacttcttttttagcgatgtcatcgtactctttcctggcggcggaaataaaattcatataccgctctttgtcctcggcggagatggacggatgctggtcgagtccttcttttaaggaacgcagcacgtcaagcgaattgatggattccatattttttctgataattgttgaggaaatgcggttgatgacataacgcgggtcaattccgctcattccttcatcatggaattccttcttcatatcctccagatcaacggaattgtaaccttcaacgctttctccgtcatagagcctcatttttttgacgagatcaatatcagagcggttcggttccttcagtcgggtcaaaatagaaaacatcgcggccacttttaatgtatggggggcgatgtgtacgtcagaaacatcactttcagaaatcattttttcataaatccgttcttcctctgacacctttaaattataaggaacaggcatcacgatgatcctggagtgaagggcttcatttttcttattggcaataaacgagcggtactccgtttcgttcgtatgcgcaacaaccaattcgtcggctgagatgagcgcaaaccgtccggctttgaaattcccttcctgcgtgagtgacagaaggtgccacagaaatttttcatcgcatttcagcatttcctgaaactccatcattccgcggttcgctttatttaattcaccgtcaaaccgataagcgcgcggatctgattctgagccgtattcggcaattgttgaaaaatcaatactccccgtcaagtcggcgatatcctgtgatttcgggtcagacgggctgaaggttccgattccggtacgtttatcctcagagaagaatatacgttcaacctttacatcctcaattctgccgccgtattcttcttcaagccgcatgacattaagcggagaaaggctgccctcaattctgatgccgtattctctgtagaagtcgtcgcgcagatgatggggaatgagatggagaggatcttcatgcatcgggcagcctttaatggcgtaaacagcgccgttgtctgtcaatgagtaggcttcaagcccttttttcagcatggtgacaagagttgactttccgccgctgacgggtcccatcaatagtaaaatccgttttcttacatcgagccgcttggcagccgggtgaaagtattcctccacgagccgttccagagattcctcaaggccgaacagctcccgcgagaaaaagctgtatgtctttttaccgtcatcctcctcgattccgctgtcttttatcatattaaaaacgcgagaatgagcagactgcgcgaccaatggattttcttttatgatctccaaataatcagcgaacgtcccttcccatttgagacgctgctcttcctctctgtacttttcaattttctttaatatatccataagaacctcctctatcatggttaatgcactagaaataaggtactttgttacaatctatgcggtgacgtgataatacatgcttttcgtttcttaaaaataaagacgttacaaggccgtcattgacaagggtccggtgcaccgttcataatgaaagaaatacagtttcatccagactcggacatcaaatggaaaagcaaagaggaggagaaatgatgaaaacgatcattttacttggggtcattctcacttttttagtatccatttttacggcgggttacgacagcaaacctgaaaacaaataacggcaaaagggtgctctttatgaagagcaccctttcctgtacaacataacaatgtttcatatttgaatatgttcttggacagttgatttttcatgagatttgcagcttgtttgatactcgattttttcgattttgcagcccgggccgatttccacatgtttccctctgacgatgtccgcttccgtgtattcgagataaattgcgtctccttcgatcaattcagcagaaagcgtgccggctttccgtttaagaaaaccgggtttccgtctgacggtgatcgatgtgccgccgatttctttcacgcggcttcggtcataacgcaaatggatgtttacgtcccccgcgtttaacaatcccgccacattgatacatcctgttacatgaagcagctccgtctcgcaatcgccgccgacggtgagactgccttttatatgacactgctctcccgcggccccgccgccaatttcagcaagtcctttcagcctcatcgtggcgaaacgcatggagccgccgactttcaatgtgcccatcacatttgctgaacgtgctgataaacctcctgcaacttcatgctctccgaaaattttcagcctgttgatctcggcatctcctagaaaaagtcccgtaccgaatatccggcagcgttcgctttgaagtccttcgccgacagttccttcccctttaatgcttacattttggtaggagccgccggaggcgtgtccggctccgtacatttttaaatgactcaatttttttgtcgtttccatcgcagttcctcctatcgtttcacgactttgttaaccaaagcggaaggatcacatgtaaaatcgccgctgtattccacagtcccaatggtgcagcctgcgccgatccgcacatgatttccgcggactgtcttcgcgttcgtgtccgccaattcaatgatgtcaccttcaatcagttccgctgtcagcaccggggccggcatcagcttaaaacgcgtaagcacgctctttctgctcatcactttcaaatggcggcagccgatctctttcacatggctttctcccgccgtcagctgaatactgacttcatcggcattcagcaggccgccgatcttgcatttgccttccgaacggaacgtctctgtctcgcaatcgccttcaatcgcggctttcccggatatgaaaatatcatcagctttcacaccgccgccgaaagatgaaaatcccgcgacgttcagccgctccgttttgacatcacctttaatgacacccgttccattgatacggatggattcagcttcggcactgccgccaattttccccgaaccgctgatcgtcagcgtttgcgtcttgacatgtccgtctgtttttccgctgccgttaaacaaaaagctcacgcactccacatcacctgacaccgtgccgcttccgttgatctccactgtatgaaaacggcctccttttgaacttcctgaaccgttgatgattaatttatctgttacttccattgatggtcctcctgcatccatttcgtttttaattcttccgatgccgcagcaagcgccacccgttcaaccactttgacagtcggttcaaataaaatatgttccgcgtctgcgatgaagcacgtcgttacgccaagctttcggagcatgacaagctccgtattcgctttcagttcggaagcctcatacgttttcagcacccctgccgccaattttccttcctcaaggctgatattgcctgattgcaaaagtccttcaagcacatataaagacagcagcgcgcgggacgtgaatgtcacaccgtcttcgccataaacttgcagcgcggcttttgaaatcagtcccttttgaagcagttccgcagacgttatattgacatcagtcatttgcggagacagcatttctctcatttcatccaaagacaaattttctttcattttctgtatttttgagatgcgttttaatatttccgctctcggaaaaaatgtttcctggcctgtaaatgttgattttcggataaaccattcttcaggaattaaatttttccgtttccagcggtacagctgcccgtatgaaattgatgtttcttccagcaattcttttttagaaatcagttgttcctccatgaatccagctccttcgacgaatgtattgtaacataacactgttacgttgttaagcctggaattataaaaatgccgtgaacagctgctgtccgtcttttttattcaataaaaaaaacgcccggatgcgggcgttttttctcacgtcaaatctctgtaattttgctggcgcagcgcttcatatacaagaatcgcggccgtgttggacaggtttaatgatctcacatgctcggtcatcggcagacgcaggcagcggtccatattgttttcgatcaattctttcggaagtccgctcgtttctctgccgaatacgaagaaaaagtcttcctccttatttgagtaatcaaatgatgtgtgcggcttttggccgaattttgtaatgaagaaaaactttccgttctcatatgcctcaaataactcttccaatgaatcatgatatacgacgttgacgaactcccaataatcgagtccggcgcgcttcagcattttatcatcggtcgagaatccgagcgggcggatcaaatgaagcgttgtgtctgttgccgcacaagtacgtgcgatatttcccgtattggccgggatttcgggttgatataaaacgacatgtaatgccacgatgttcacctctgttttttattccgcccaccattatatcattaattactcttttgtcgtatcatccgtaatatgaaaaaacgcatatctgatggaaggagtatacgccgttgaatcctcatatgaccaatatctcattctgctgtcatacgtttgggcattgacgagcggcatattgcttttatctttcgcgaccacgatcgccgtatgattaaaacggccgtccccttcaaaatcatagcaaatgatatctccgggcatcagttcttcggctcttgatacttgcaccgcgcgaagccctgccttggattgggccagatacatcttcatcgaatgcgcgaccgtccagctgtagctccacgagcttgccttcatccaccagcctgagcctctgttcggatgcccccgcatcggtgcttttccggcatgtaaacattgggaaataaaattggtgcagttgtcgctgaaatttttataagcggggtttcgtttattccaaaacttctccgcgtactgcacggcagccagacggtcgtattgaaacgcccgcccgaaatcttcccgttcactccgctcatattcaattacgctgtttccgtcagaaaatcccgccggttttttctttacttcccggtctttaatcaaaagctgatcatagagaaatgcagtccgttcctcaatctgctcttctaagtaaaggtgtccgtcatgctccttgcacaaatattcgaaatgaatcgtgtacatgacgcataacgtgccgtcgtcctcaaggctgcttttgacaatgacggcttttgccttcgctttcacgatgtcaactttccgtttttcaaacagctctttttttctcgtcaggacctcaagatcgccgggctgcccattgtgcctcatctcggttccgttgattaaataatgaagccgggcctccgctaaatcttcaataatatgcttcaagcgctccacccaccatactgttttataaagaaaaaaacacttgaactcacgccaagtgctttttctctatacatatgtcaggaccggccggttttagtcttatcagaaaccgataacagctccagtcccttttcaatttcccgtatggcgtcctcatcctgctccttttgaagcgctttttctaattcccccgcataatcaggatcaccgattttcccgatggcccaggcggccgtccccctgatgacggggcgcggatcttggtgcatcaaggccgttaattccggaagagacgaggcatctttaaaatgagccaaagctaaaatcgcattccgctgtatcggcttcttgccgcgccatgatcccgatacatgtccgaatttttctttgaattcgcggttgcttatggtcaaaagcggctttaacagcggctttgcgatttccggatcaggctccatctgcggatgaagatgaaaatctttccccttattaatcggacagaccgtctggcacgtgtcacagccatacagacggtttccgattttcgtgcggaactcatccggcagaaatccctttgtctgggtcaggaacgaaatacagcgctgggcgttaagctgtccgggattgacgagcgcgccggtcggacacgcgtctaaacattttgtgcacgtaccgcacatatcttcaatcggcacatccggttcaaagggcagattggtgatcatttcagccagatagacgtaagagccgtattcaggcgtggtgatcatgcagtttttggcgctgaagccgattcccgcccgttcagccacggccctgtcggacaattcccctgtatccaccattgacttcgtgcggatatcctcatgtttgctttggagaaaattctccagcagatcaagcttttccctcagcacgtcatgataatccttcccccaggaagctctgcaaaaaatgccgcgccgcccgtccctcgtgctcctcggcgcatctttcattttggaaggataagcaagggcgatggcgacgattgatttggctttcgggagaagcaaagacggtgtaacccgtttttcaatatccggttcttcaaacccggataaatagccgagtgattcctgaagaatcagccggtcccgcagactgtcgaacgtatcagccgtcgtaaacccgattttgtcgactccgatgctgttggcgtattcgattaattcctctttcagtttatgaatattcattttttgcacagcctcctttctttgtgatcaggctcccgcacaggtataatagagttttatcatcccgaaatggagtgaacacacttgaacatcagtttagatccacttattgctgaacgggtgccggggatcaaagcggcagccgtcttatatgaacagatcgaaatcgggcctgctccgcaaatgctgaaaggccgcctccgtttatttcaagaatctctttactttgattatgctgacggcggtatagatgagcagccttttgtaaaagagtgggcgcgtataatggaacagctcagtctcgccttttcaggacaaaaaacgccgatggagcttatgctcggcgatatttcccgggaacgattcattgaaagtgtgaattcagcccatgataccatactttttttctccttgaaatattcattgcctatcatggcgtatgatgccgcagaaatagatgaaccgatttcaattacgatcggagaaaaagaaagcgtactgtctttctccggcccggacggcgttttcggcgacttcaccggacatatcaatacacgccctgtcacgcccggcacaaagaaaatgctgcagctgatctttttcccgccttcatttcatgccgacgcggcggatgagctgctatcatccttaacaaaaatgtttgaacaaattcacggaggcacgcataccgtctcttggctttcataaaaagacacgccttcgtgtcttttttcacataaaaaaacgcaatacttcgtttatcagagaaacgaaacactgcgttaataacgtatgtatggagcgggtgatgagaatcgaactcacgacatcagcttggaaggctgaggttttaccactaaactacacccgcatcaaaattatttttttgtcagtaccgatttgatgtttctaatattacatgtttatttttttttcgtcaagggaatgttaaaaaatttgtcgaaaaaaattctttttttgtccacatgttaagttgggtttacattttgttaagagtctcatacaatatgaaaaagaagaaaacttgaggtacgcctgatgatgaaaaataaagtaaaagagctgagagccagattcggctattctcaggaaacgctcggaaaagaagccggagccaccagacagacgattgcagcgattgaaaaaggagattatgtgccttcacttttattggcgcttaacatctgccgggctttctccctgccgatggaggaagttttctggctggaggaggagaaaaaatgagtttgaaaagaaaagcgtgttttcaccttgcactctacggattggcctgctggacgcttatttcctttatggaagcggcgccgcggatcgctcagtttttccaaacggaggggagcggttcatttgagctgaatatcacgccgtttctgctgtttaccgtttgtactgcattatatatctatactgaaaagaaaaaacggaacggcaaaaagcacaggcttgtgcccgatgaatttgaggaacaggatgaaagagaacggatgatgacggctaaagcttgccgttcctcgtatatcgccgtttacttctcattgccggccgcagccgttctgcttttgttttatccgctgattcagccacatcttcccttttttccgattcttttgattttcattctgatgatgattcagcatttggcttatgttttcacttttcataagcacggcaaaaactccggttcatgacagatccggagttttttacgttaccagctcgcttttttcaccccgggaatccggcctttatgggccagctccctgaatgcgattctggacagtttaaattttctcatatatccgcggggccgccccgtcaacgtacagcggttatgaagcctgcccggagcagtatcacgcggcagtttgctcagcgcttcccagtctccttttgcctttaattctcttcggatgtccgcatattgttcaacaagcttctgccgcttgagctctttgatcacttttgatttttttgccatttcagcactcctaacaaatcgtaataattacgttttgtatcatatcatccatatgagcatcgtgcaagctaagcgcttaaaaaggcgggtgaatatccgccttcactgccggcatttccccggaaatgaaaccgcagaaagcgcccgccgtcaattatccgccttgcgacgtcatcagactgtcgctttatttcctcttgcaaaatggtcgtttcccattgcttcacccagtctgcgctcaagctttttagtccgttcattctgaaacggcagaagcggaaacacgagttcagccagataataagcttcttccagatgcgggtagcctgaaaagataaacgtctcaatgccgagtgcctgatactctaaaattcgagcagcgacagtctgcggatcaccgacaagcgccgtgcccgctccgcctctgaccagtccgatgccggcccagagattcgggctgatctcaagcttcgagcggtcaccgttatggagatcggccatccgtttttgtcccgatgaatcagcgcgccgaagcgcagcctgcgctttcgcaatcgtctcttcgtctaagtggctgattaatcgatcagccgcttcccatgcctcttcctcagtctcccggacaatcacgtgaagtctgataccaaaacgcatcgtccttccttccttggcagcctgttttttaacggtttcaatcttttcttttacctgctccggcggctctccccatgttaaatagacatctgtatgtttcgccgcagcttcaattcccgcctgtgatgaaccgccgaaatataatggcggatgcggagactgctttggcggaaacagcagattgctgttttccactttgatatggtccccttcatatgtcaccgtttccccccgcatgagtccgcgccagacggttaaaaattcttcagtcgccttataacgttcatcgtggctgataaacatgccgtctcccgccagttcataaggatctccgcccgctacgacatttacgagcaaacggccgtctgacagccggtccattgtcgacgccattctcgcggcgacagacggctgcatcagtcccggacggaccgccactaaaaatttcaagtcactcgtttcccccgctaaagcggcagccgtcagccacgggtcttcacatgatctccccgtcggcagcagaacccccgtataaccgagtctgtccgccgcctgtgccacttgcttaaaataaagatgatccgccgttctccctcccgtttgcgtccctaaataccggccgtcaccatgcgtcggaataaaccaaagaatctccatatgaatctctccttttttaataggttacccttcataactgttccgccattttaatagtttccgttcgagcattctgaccaatgcatctgtcagcttgccgacagccgcaaaaatgataatgccgacaaacaccttatttgtctgtgaaaattgtctggcatccataatcatataaccgacgccctcgctcgatcccatcagttccgccaccacgagaccgagccacgcaatgcctagagagagcctgatgccgagcaggatattcggcagagatgccggaagaattaatttcgtcatctgctgataccagttaaattccagcacccgcgcgacgtcaaacagcttcgcgtccacactgcggattccgagaaacgtattaatgtacacggggaaaaatgcccctaatgcgatcagcagaatttttgatgtctcatcaaatccgaaccacaaaataaacagaggagtcacggccaagtgcggaaccgttctgagcatttgaagagacggatctagatatgcttccgtccgctttgagaaaccgaccagcagcccgaaaacaagtccgaggcccgcgccaagcagaaatccggcagccgcccggtataagctgatctctaaatgaccccaaagttcacctgaaagaagaagttcctgaaacgtctgcaagatgacgacaggtgaggggagcaccgtggccgagacgatgcccagacttgcgataacctgccatactgcgataaccgcagccgggagtacaacccctttcatccattggtatgaatacttccgggatcttgccagagctttcttttctgattggcttattgcgccggcagccgttgatgcttctgctttcattacttgccaccccccgtttcaagcgcttttttaataaatgaattgtcgacaacgtcttttacatgaattttcttatgaatcgcttttgtttgatattgaaaatcagcggtttcctgctgggctttgacaatatcatcattgatcggttcattgagaggctcagtattgttaagcacgtttctgacgactttcggatcaagatgtttgattttcgcatataaggagacagcttcatctttgtgttccttttgccatgtaactgctttattgaacactttcagaaaacggaccacctcatccgggtgttctttggaaaatcccgttctgactaacgtgaaaccgggagaatataaatctgtgctttctccgttcgccaatatttccgccccgtgctgcagcgtttcaatcgacaaatacggctcccaaatggaccatgcgtcaactgatttgttttcaaaagcggaaaccgcctcatcaggctgaagctggatgatggtgacgtcatcgtcggaaagccccgctttatctaaagctttatagagaaaatcaaagccgctgctgcctttggctacagcgatttttttacctttcaattctttcaggctctgaatcccgctgcccttgtttacgagaatgccgtttgcctttaacccgtcctgagacagcccgatctctttaaaatcaattccagccgcctgaccggaaatgaccggtgaattgccgacctgggaaaaatcaagcttatcggcggcaagaccttcaaattgcggaggaccgctttggaattcgacccattttacttttattccgtcttttttgaaggcctcttcaaaccagcctttttccttggcaatgagaagcgggcttaaactctgctggatgccgatccggatttctttcaccgttttcccgctcccccctgtcctgtctgcactgcatccggctgacatcatgactgctgcggctaaaagaatgatgatttttttcacttcacttcgtcccttctatatcccggacccatccgcaaaccggaggtcttccgttttctcaaactcagaaagcaccttctgccggacggcctgaaaatccgctgaggtccgattgcgcggatgcggaagctgaatcggcatcaggctgtgcagccggccgggctttgccctgaggatcgccagcttatcgcctaaatagacggattcatcaatatcatgcgtgaccagaatcatcgtcgtttttttctcgcgccatatatcaagcagcacatcctgcaaatgtttcctcgtaaaagcgtcaagcgccccgaacggttcatctaaaagcagcacctccggctcgcgcaaaagggctctggcgatggcaacccgctgcgacatgccgccggataattcgcgcggataagcgttctccgctccctgcagcctgacaacctcaatcagatcatccacttttttccgaacggccgggtcgttcatattgagatcggcagcgatgttttgttttaccgtcagccagggaaacagccggtgctcctgaaagataaatccctgccggatgcccggtcccgacacattgcggccgtttattgtgacagagcctttataatcggtatcaagaccggcaatcaattttaaaagcgtgcttttgccgcatccgctcggcccgatgacagtcaaaaattctcccgatgcaattgacagctcaatatcattcagcaccggcgttttccggccttcatgctcaaaagctttttcttgtatgctgatggttacagccatctgtcttcccctctctttctgccgcgtgcgatcgaaaaacaaaaaggcccccatctccgattgcttgcagagatgggagccttcggcggtccgatcggcaacccgtttgtttttaaatttgaatatcatgttaattcaaattattccgactcgtcaactgttttttataaggattaaaatacgccctccggtataaccctgccagagagcgcatcggctgtatcacgtatttacttccttttcttggcgggcgattttcaataatgtccgcgcgttgttgccgaaaatgttctctatatcttcttcccgcatattgatttcccggcaggtcctcacctgctcctgaagatatctgtatacatatcctctcggaaatccgttcgaatccgtcccgaagatgatccgttcagcaccgattaattcagatgtcttccgaaacagaatttccaaatcaagcgggtacggcatccacctcatccactgatttgagccggacgtgtcaatatacacattcgggcagctccagcacagctgcagcagttcctgataatatccggcgccgaaatgcggaatgatgaacgggatatcagcatactctctcgcgacgcgatagatggagagcgggttgatgttgcgatggctgacaatgccccccgctcttcctaaaagcccgaagtgaattaatacaggcagccttttgtcagctagatacgtccacagctttttcagcgacggatcatgaaaatcgatgtctgtcagcggcccgaacagtttatatcctttcagaccgagctcttctaccgctcttttcagctctccatacgcatcctcccgctccaaaggatgatatgcaaatccggtaaatctcgcgggattggcttgaataaacgccgccatccggtcattgctctctgctgttaaaaaattcagcacgtcaatgccatacttatctaattcattctcccatcttgtcatcaaagcgatttcgccgtcatcgccctcaacatcatgcggatcaggaaaatcccaagtcagattcattctatctgaccgctcccggttataatcggaaaatgtcttatcgtttttgccgaaataaaggctgtacggcagatgaccgtgaatatcgacaggtttaaaatgctgccggaaaagcatacaatcgccgcctctcttaccgcctgacaataaaaaaaggcccttatccagtgaagaataagagcctcttgtgtccaagtcagcggtttctattttttctcatcttaaacccattattcccgtcagtcaagtatgctatcaaacccaaacccttttttcgataataaaaataattattttataatcattataaaataatattgactttttaatgataggtgatattatgtttttataaatctaaagaggtgatcacatgagttcaaataaattgacaaccagctggggcgctcctgtcggagataaccaaaactcaatgacggccggcgatcgcggtcctgctttaatacaagacgtccatctgcttgagaaattggcgcactttaacagagaacgcgttcccgagcgtgtcgttcacgcaaaaggcgcgggcgcacacggttattttgaagtcacaaatgacgttacaaaatatacgaaagccgcatttctgtcagaagtcggtaaacgcacgccgctcttcatccgtttctcaaccgttgcgggcgaactgggctctagtgacacagtgcgcgacccgcgcggatttgccgttaagttttatacagaagaaggaaactacgacatcgtcggaaacaatacacccgtgttcttcatccgcgatgccatcaagttccctgactttatccatacacaaaaaagagatccgagaacacatctgaaaaacccgacggccgtttgggatttctggtctctgtcaccggaatccctgcaccaggtcaccattctgatgtcagaccggggcattccggcgactcttcgccatatgcacggattcggaagccatacatttaaatggacaaatgataaaggcgaaggcgtctggatcaaatatcactttaaaacagagcaaggcgtgaaaaaccttgatgttaatacagccgcaaaaatcgcgggcgaaaatcccgattaccatacggaagatttgttcaatgcgattgaaaacggcgatttccccgcatggaaattatatgttcaaatcatgccgttagaagacgcaaacacatatcgctttgatccgtttgacgtcacaaaagtatggtctcaaaaagattatccgctgatcgaagtcggccgcatggttctgaaccgcaatccggaaaattactttgcggaagtagaacaggcgacgttctctcccggcacattagtcccgggcgtcgacgtctcacctgacaaaatgcttcaaggccggttgttcgcataccatgacgcgcatcgctaccgtgtcggcgcgaaccatcaggcgctgccgatcaaccgttcccgcaatgaagtgaaaaactatcagcgtgacggacaaatgcgttttgatgataacggcggccgctccgtctattacgagcctaacagcttcggcggcccgaaagagtcacctgaagataaacaggcggcatatcctgtatcaggtttcgctgacagtgtaagctatcatcatcatgatcattacacacaagccggcgacctgtaccgcctgatgagcgaagaagagcgcgcgcgccttgtcgccaatatcgtcagtgcgatgaaacctgtggaaatagaagaaattaagctgcgccagatcggccacttctacaaagctgatcctgaatacggcagacgcgttgccgaaggactcggactgccatcaccaaaataatatcaaaaaacctgccggtctgcccggcaggttttttctgtttattatcaataaaaccgtttttttctcaattatacgaagtggcatgccgcaaaatgatgaagccctttttctgacagcgccggacttttctcagcacatatcttcttggctgccgggcatctcgttcggaatttacagcctgaaggcggatcagaggggctcggtatatcaccctttaaaattatccgctcccttttcgctccgggatcaggaacaggcacggctgataacagcgctttcgtataagggtgaagcggccgtgaaaagagctcctcctttgacgcgtattccacaatcgtccctaaatacatgatggcgaccttcgtacataagtgctccaccacgcttaaatcatgagaaatgaataaatatgacagcccgtgctgtttttgaaggctgctgaacaaattgatcatctgcgcctggatggagacatctaacgccgccacgggttcatccataatgataaattgcggcttgagcgccatcgctcttgcaatcacgatccgctgccgctgccctccggaaaattcatgcggataacggtcgataaagtttgcggaaagtccgcaggcttcaagaacttccgccgctttatcacgcgcgttccgtttcaccgccaattgatgctcgatcatcgcttcaccgatggcttctccgatccggcgccggggatttaaagaactgaacggatcttgaaagatgagctgcgcttctgatctgaaagttttgagctcgcgccggctcatccgaaacacatcacgcccctgaaaaaacacctctccctctgttttttcatgaagcctcaaaatggtcttgccgattgatgactttccgctgcccgattctcccgctaagccgaacacttctccctttcctatcgtaaaactgacaccgtcaaccgcttttacgggatttttgcgggtctttctcatccccccatgctcctcgtaatattttttcagccccttgacctccagcaacacatcactcatctgctttctcctctctgtaaagccagcacgccgcctgatgccccttcccgaattcagtaaaatgcgggctcgatttccggcatatttccgtgctgtgttcacatcgctccgcaaaataacaagacgatcccgacaggtccgcaagctcggggacttgccccggaatggtgtacaacatctcccttctttgaccgataaccggcttggccgcgagcagccctttcgtatacggatgcttcggatcagaaaacagctttgcaaccggtccttcctccacaatttttcccgcatacatgacaatcacataatcagccatttcagcaaccacgccaaggtcatgagtaatgaataaaatagacgtgcgaaattgctttttcatatcccgcaataaatccaatatctgcgcctgaatggttacgtcaagcgctgtcgtcggctcgtcggcaatgatcagtttcggttcgcagcttagcgcgacagccgtcatgatgcgctgcagcatgccgccgctcagttcatgaggatattggtgcataacctgctcggcatgcgggatctccactaacgtgatcagttcaacggccctccgccatgcttctttcttactcagcaataaatgttcgcgaatcggttcggccagctgctcaccgattgtaaataccggattcaaagatgtcatcggttcctgaaatatcatcccgatttcgctgccgcggattttctgcatgtcttttggtttcaattccaacaggttccgtccggaaaaatgcaccgctccccgttcgattctccccgtctcgggaataagctgcataatggacaatgacgccatgcttttcccgcagccggactcccctacaatacaaaccgtttcctcctcatgtatcgtaaagctgacatcgtccacggcctttaccgccccctcctcagtataaaaagccgtttccaaatgcctcacttctaaaagcggttttttcatttcattttcacctgccgttttaccttaggatcaaaagcgtctcttaaaccgtctccaagcagatgaatcgccacaacggtcagaaaaatggccgttcccggcggaatccacagccacggacggagtgtaaaatccataaaatgattcgccgcttccatcatgtttccccaagaaggtgtcggcggagcaacgccaagcccgagaaaactcagcgccgattcactcagcatcgctcccgccacatgcaaagtcgccgctaccagtaataacggcaatgtattgggaagcaaatgatagaggattttccgtttatcactaagccccagaacttccgcggccatcataaacggctgctccttgagcgacaaaatctgtccgcgtacaagccgcgccagaccgggccatccgatcaggcttaacatcatcataatcaggtacattctgtattcagaaggcactttccactccgacatcaccgcagccaaaatcaaaagcagcggcagtcccgggatggacatgagcatatcagcaatacgcataatgatcatatcagcggctccccgataaaatccggccgcagccccgagtaaagaaccgatgacaagcgacagcaccattgaagcaagccccacggtcagagaaatctgccccgccagcatcagcctcgtcagcacatctctcccgtactggtcagttcccagccaatgatggattcccggctgctgattggcatttgaaatatccgtccgatctgttatgtacggagaaaaagacggcccgataaagcacaataaaaacataaaacataagaaaagaagactgatgaccgtcagcttatgctgcagcaggcggcggtacgtctgcttccaaagagaaggcggcacccctttttgttttttcattccgaacaccccctatttcagcctgacccgcggatcaaccgcggcataagcgatatccgccaagaagttccccgcaatcgttaaacaagacaaaaacaaggtaaacgccatcaaaaccggataatcacgataatgcacagattccagctgaatacgtccgacacccggccacccgaaaatctgttcaataatgatggctccggaaaacagtcccggcagttcaaaagcaagcagggtgatggccggaatgagcgcgtttttcaacgcatgtttccagatgacggtgcgttctttcaatcccttcgctctcgccgttctgatataatcctgtctgatcacgtccagcatgccggagcggaaataccttgtcagcgagccgatgccgagcatagataaaatcacgaccggaagaatcatatgtctggcggcttcaagcacgtacgaaaaacctgtactcgtgcttccggtatcaatcatcccgccgacgggcaatattttcaaatccaccccaaaccacttaataaacagaaggctgataaaaaaagacgggaacgccatggaagcaaaaacaagaaacgtcacgatcccgtcaaaccatgagtatttcctgacagcggatatgacacccgttatcatcgcggctgaccatgtgacaagcaacgccaaaaacgcgacaaaaaacgaattccagacatatttccgaagcagtgacaggacgttctcctgatatttcaaagaaaacccaaaatctccgctgagcacatttccgagccatgtcacatagcgctgccaaatcggctgatccagcccgtaaagcgcttttaactcctgcgctctttcaggagtcaggtttacattggaatcaatatagtcgcccggcagcatggcgaataagaaaaaaataataaaggacgtaccaaataagatcacaagcatttgaatgaatcgttctgcggcataccgtttcacaaaaagcctctcctttccgctgaaagggcaaaatccccaggatgcaccgggtattttgcccaaccgttctattgaattgagacatttgagagacttggactgattccagaataattgtcaggctcaagcccttttatttttccgctgaccgcccttgcgctctgacggtaatgaatcagaatgtaaggcgggttttccccgagctcccggtacagctggtgataaatctcttttcttttgctgatatcaagcgtgccggctcctttctctatcagccggtccgctttcggattggaataccccgttacattattgggatggccggaagccagcttttccaccgtgtcattcggatcaagaatctgcgaggtggaaacggcggcaaggtcatattgtttgtcatttattttcgctacttctgtattaaaatccatcacttccggttttaatgagattccgatgtccgcgtaattttctttcgcgatcgggatgaaatcatcatccgctttagacgtgtaatagctgatttcaagctttttgccgtttttttcacgtacaccgtctttgcccgttttccagcctgcttcatcgagaagctttttggctttttcagggttaaacgcgtaccgattgacatctttgtcatcataagcccacgaaaccggagacaccggcacattcgcgacttctccgtagcgtttaaagcggacatcgacgattttttgacggtcaagtccgtaaataagcgcctgggacactttcttatcttgaaaaggcggacgcttgtgattgacgtacacaagcccgtaatcattcacgacagatacgcttatattggcaaaaccgagactttttaaatgctgaaccgtatcatcatcaggtgagaaagaagcgtaatcaaggtcacccgtttcaaacagctgaagagaagttgacggatcgataattttataaatcagcttttcggttttcggttttccggcataatagtgttcattagcctgatagcgtatttcctgtcccggaaggtattctgtaaattgataaggtcccgctccgagcggtttggcataaagctcttttaaatagtccagtttgccgaattgatatttcttcccgtagtaggcttctgacagcacctgccctcccaaaagaagcagcgacttcgcactgactgtctcagtcgtaatttgaatggttctgtcatcaaggacgcgaatgccatctatcgtctttgcctttccttctttgtaagccttaccgcctttaatataggcagtggtgatatcttcatagcccgcgtatgcaggatcatgcagcagtgttaaagtgaatgcggcatcctttgcggtcagcggtgaaccgtcgctgaaaacgagattttttcttaaacggaacgtgtatgtaagctgatctttggaaattttccagctttccgcaagagccggggcaggcttccccgttttatccagtttgactaacggttcaaaaataggatctgtcgcatttccgtcccagccgttttcgtaaaagtacggcagaaacacgccgcccggcgcggaaatcccagcaacaaaagtgtcagttctggctttcgatttagcgggaatcgccgccggatgagaagctttaaattcctttgtctcgacatgggcgatacgtgtttcttcctttttatcagccgcagatgacggttcttctccggcactccctaacgcgcaccctgataacatgatggataccgacagcgcgagtaccgttgtttttatcctccattttctctccttcatttttatcgaacccccgcatgcttttcatctatctttatataaatctgctccatctgttcctcatttctcataatctcccgtttatttttctctacaagcagttcgaaattcaatgtgtgttttctgtacttttttcgttttttgctctttttgcgcacatgtgataccttttttaacgccacttttcatccctccgcttttcatttcattcaatgactttcacgcaaaaaaggcccttatctgtttaaaagataagagccttcggtgatccgatcagccatcgtttggaaatatgtaatgattatgttaattcatacaatccctacctgtcaactacaatttaaaatatcgtttccttccgggggttttcctcatacactctctcatttttccgcatatgctagaaaacatagcagagtacaagtgaaagtgagtgagaatgtggaaaagacaacattgaccggtcgcatcgtcaaaaaagatgacccagaatataatgctgcaagaaccaatatcaatttaagcctgcaaagatatccagacatcattgtgttttgtcaaaataaacatgacgccctcaatgcgctgagatgggcgcgtgagaacaatgtgcctttccgtatcagaggcggaagacacagctacgaaaatttttccctgttaaataacggactagtcattgatctcagtgaaatgaagaaaataagagtaaatgaggatacgcggctggtctcgattgaagcgggagccgaattgggggaagtctaccggacactctggcggtacggcttgacccttcctgcggggaccattgcgaatgtgggaatcacggggctgacgctcgggggaggaatcggatatttaacaaggacagccggacttacttgcgatcgtctcctccagctcgaaatgatcatagcggacgaaaaagcgggtgctgacttgatcacagtcaaccgttcaaagcactctgatctattttgggcgtctcagggaggagggggaggcaacttcggcattgtcacatccatgatgtttaaagccgtgccgatctcgtgcgtgtctgttttttctgtcacttggggctgggatgattttgaggaagtatttaacacgtggcagcgatgggctccatttacagacaaccggcttacctcatcaattcagttttggcctaaggaagtaaaccgcatagaggctctcggtcaatttaccgggacaaaggatgagctgaaagaactgctggctccgttaatgaaagcgggaaaaccgacaagcggcatggtcaagacagtgccatttattaaagcggcagccttttttaacagcccgggaggcaatcagccgcaaaagatgaagcggtcaggatcctttattgaaaaaccattatctacacgcgcgatttccactttaaagcgctatttagagcacgctccgaacgaaaacgccagtgtctggcagcaatctctcggcggggcggccggacggatcgctccggaccaaacggcattctactatcgcaacgcaatcattgcccaagaatatattacaacttggacatctgctgaagaagaaagacaaaatgtccgctggatcgaaggactgagaacgtctctatcaagagaaacgatgggagattacgtgaattggcctgatagagaaatcagaaactggctgcaaacatattacggagaaaatgttcaccgcctccgtcaagtcaaaacgaaatacgatccggaaaatatattccgatttgagcagagcattccgccgcttcgccgttcaccgtttttctaaaaaagatgaagatgggcaaactccatcttcatcttttcttttattgatataagcggcttcccttctctgcaaactcttttgctttttctttcagcccttcattgacggcctcgtcttcagtaagtccgttttccttcgcataatcacgaatatcctgagaaattctcatgctgcagaacttcggaccgcacatcgaacagaagtgagccgtttttgcgccttcagccggcagcgtttcatcatgatattcgattgctctttcaggatcaagcgacaaatgaaattgatcacgccaccggaattcaaaccgcgccttagacagagcatcgtcacggatctgtgcacccggatgccctttagcaaggtctgcggcatgtgccgcgattttgtacgtaatgacgccttctcttacatcatcacgattcggcagccccaaatgctccttcggcgtgacatagcaaagcatcgccgtcccataccagccgatcatcgccgcgccgattgctgaagtaatgtggtcataacccggagcgatatccgtcgttaatggcccgagcgtgtaaaaaggcgcctctttacaaatttccagctgcttgtccatgttttccttaattttatgcatcggcacatgacccggtccttcaatcatcacttgcacatcgtgcttccacgcaatctccgtcaattctccgagagtctccaattccgcaaactgcgcttcatcattggcatccgcaatcgaaccggggcgaagcccgtcaccaagagaaaaagcgatatcataggtcttcatgatttcacaaatttcttcaaaatgcgtgtacagaaagctttcctgatgatgagccaggcaccattgcgccataatcgccccgccgcgggaaacgattcccgtcgtgcgtttggccgttaacgggacgtaacgaagcagtacgccggcatggatggtgaaataatccacgccctgctccgcctgctcaatcaatgtgtcacgataaatgtcccacgttaaatcctcggcaatgccattcactttttcaagcgcctgataaatcggcaccgtccccacaggcacggggcagttgcggataatccattcacgcgtcgtatgaatgtcttttcccgtggataagtccatcatcgtatcggcgccccagcgaatcgcccacgtcattttttcgacttcttcttcgatagaagatgtaacagccgagttgccgatatttgcattgattttcacatgaaaattccggccgataatcatcggctcgctttccgggtggttgacgttagaaggaataatcgcccgtccgctcgccacctcttccctgacaaattcgggagacacatgctcgcgaattgcgataaactccatttccggcgtaatgatgccttttctcgcataatgcaattgtgttacatttttccccggcttggcccgaagcggtttccgctgtaggccggggtattcggcggcacggccctcttttttataaccgttgtcttcaggcttcacggtccggccgttatattcctctacatctccgcgcccggtaatccactttgtgcggagcgcccccagcccttcatgaatatcaatttgtacatccgggtctgtatacggcccgctcgtatcataaacacggaccggcgcattctcctcttccccgaatgcccccgtagtcgcactcaggctgatttcccgcatcggcactcgtatatcgggcgaagaaccttctgcataaacctttttactgccggaaaaactcgacataatggaaatgttcgcttgctgtactgattgattttgcatacaaatctctcctttatcatttgaataacagaaccaagctcagcaccagcacaaaaaaaccgggttcaaagaagaacccggttttgcagtcagaaagaaactattattgttttcttcaacaataataaaacctttacttccccacgctggtacgaaccagatcaggtccaaagggttaagaagccgccgcttctctctcagcccgctcagacgggcacccccagtaactattaatttcgctctcatcgtaacataagttgtgtacaaaaaaaagcatattatcaaaattcagataacgggacagtcataagctctgcttcccgaacgccttcttcggtattaaaaacccgataaccctttgcggtttcccgggaagagacagcccggatcagctgaccgtctttataatgaagcgcagcgccgtcatcagcggcatagccctccctgagtttcttttctgaaatcagacggtgatacaccggccggcgccccgcttctccgtcatagtgcggacaaaagctgcccggcaaaaatcctaaagctcttaactctctcaaatctccagctgaatccgtcaatccttcttcataccagcaaatcgccccggcgctgagacccgccaacatgatgccgttttcccaagcctcacgaagaatacggtcaagcccccattctttccataagacaagcatattgcgcgtatttccgccgccgacatatataatgtctttcttcatgagaaaggatctgagatcagaacccggcggtttaaacagcgtcaagtgatccggctcacaccgcagcttttgaaaggcctgataaaacctgccgatataattttccgaatctccgcttgccgtcggcaaaaaacaaactttcggctttgaccgcgccgactgctctaaaatatactgatccagcacaagatgatccggctccatggaaaagccaccgccgcccattgcaataatctgcttcacgtcatcacctctttttttctctagtataacagctcataaaaaggcgttatcccattttcggataacgccttcaaaaagtatttgttatctgaaaaatgaaaacgcaccgtataacacaacggagatccctgcggcgataagcgccggaacaagcttcgaacgggcatacttcacaacatcgatccccaacaccgtacaggttgtcaccgtattatcactgagaggagaagcaaacgctccaaatgttccgctcgcaaacacagccccgatcgctaataataagctggtatgtgactgaaccgccagcgttacgccgagcggcattaatagcccccaagtcccccaggatgacccgataaaataggatataacagcccccagtataaaaagagacggcgcaataaacatatgagggatccatgacgttaaatgagaagtaacatatttcgagaatcccagatcttcagatactgctgttacggcccaaatcagcgataacataataataacgttgaccaattcgtttccgcccttaataaaatgggtaacaagctcgcctgcatgaaaacgctgaaacataaaaagagcaaatgctgcaataaccgctgccaataatgcggttaacatgacgccaagcatatcacttttgataaaagcattcaaaaacccttgtgcttttgaatgaccgtcccaccagctgagaaagagtgttaatagcaaaaacagcccgatcggaatgattaaattccaaggccgaatcggtgtttccttaatataagcacggtgcgccgaatccagctcctcctgctggtcagcatgctcatcactttcgaacattcccgtatgtccaccgtgaatatctgagatcgtccctgtttccatgttgaatgaacctgagccttttgaaagcaacacaccgctgttccgcggaatcggttccgtatttttgttatgtttgcgagcagaagtttgtccgctcttttctgttttttctaagctttcgtccgctttttgtttcttaaaaaagcagtaataaattccgactactataatcacaatggagaaaaaattgaaaggaatacttttacatacaccgtataagccggctgatctattcctgacgttttaagggcctgtccgataatggaaaccatgtagccgacaaatgccgttgctatcggaatcaaggcaatgacagggtttgccataaactcaatggcatacgcaattttctgtttcgacaggtccagacgcttgcttaacgctttcatgatcggtgcaattgtgacgatgcgaaagtccggttcactaaacgtgccaaatgtcgacagccatgcaagcagcatcgcaccttttttggttttaacttttttactgatcaaatggacgaatccttttatcccgccggtcagctttataatccctacaaggccggcaaatgaatatagaaacacaatgattctaatattattggtgacgacaatattgctgattacatattgaaccatatgttcaatcccgccaagcaagctgggatgcaaaagatagcttccgaccagcaaaccgataaacagaccggactgcacttgctttgtaatgattgaaatgggaatgaccagaataaatgggataagacaagcccaagtcccttccactaaaaacacctctttcaaagaacttcttgttagtatctttgaaaaaagcggatttatacaatcagcaggtatcatgttttcacaagccttggaggatattttcatacaacaaaaaaggcttctacatattgtagaagcctttgtataccggtggccggggtcgaaccggcactccagaaggaacacgattttgagtcgtgcgcgtctgccaattccgccacaccggcatgtaatgcgtcgtgttcaaccgacgtatataaatataacatgtattttataaaccgtcaacggttttagcaaagttttttaaatggtaatgcagtatatccgatacaaacaagaaacttatattgatagtcattacgtttttattatataaaaagagtgatctgcaatatgcaaatcactctcatatatgttttataatgtgaaaattgatgaccaatttaacatagttcgttcaaagttaaattggtgccgagggccggacttgaaccggcacggtagtcacctaccgcaggattttaagtcctgtgtgtctgccaattccaccaccccggcaatagaaaggcgacacccggattcgaaccggggataaaggttttgcagacctctgccttaccacttggctatgccgccgtaatttggagcggaagacgggattcgaacccgcgacccccaccttggcaaggtgatgttctaccactgaactacttccgcaacatgtaaaagaacttaatacatcttatgctgttgttttttaaaaaatgcaactgggctagctggattcgaaccaacgcatgacggagtcaaagtccgttgccttaccgcttggctatagcccaatgataaaatggggcgattgatgggaatcgaacccacgagtgccagagccacaatctggtgcgttaaccacttcgccacaaccgccataatctgaagatgaataaataatatagtggcaggggcagtaggaatcgaacccacaccggaggttttggagacctctgttctaccgttaaactatgcccctatttataaaatggtggaggggggcagattcgaactgccgaaccctgagggagcggatttacagtccgccgcgtttagccacttcgctacccctccatcatttagagtgccggccagaggacttgaacccccaacctactgattacaagtcagttgctctaccaattgagctagaccggcaaatggtggctcgggacggaatcgaaccgccgacacacggattttcagtccgttgctctaccaactgagctaccgagccattttataaatggcggtccggacgggactcgaacccgcgacctcctgcgtgacaggcaggcattctaaccaactgaactaccggaccatttaatttttggttgcgggggcaggatttgaacctgcgaccttcgggttatgagcccgacgagctaccgaactgctccaccccgcgataataatggtggaggatgacgggctcgaaccgccgaccctctgcttgtaaggcagatgctctcccagctgagctaatcctccatcatataagtgacccgtacgggattcgaacccgtgttaccgccgtgaaagggcggtgtcttaaccgcttgaccaacgggccctggtattttttcgtttgttatgtattaataattagtggcggagagcaagggattcgaacccttgagacggggttaccgcctacacgatttccaatcgtgctccttcggccactcggacagctctccataaatggctccgcaggtaggattcgaacctacgaccgatcggttaacagccgatagctctaccactgagctactgcggaatgaagtctgcctggcgatgtcctactctcacagggggaaacccccgactaccatcggcgctgaagagcttaacttccgtgttcggcatgggaacgggtgtgacctcttcgccatcatcaccagacgttttagtgacatgtattattatactatatatttcagaaaaagcaagagtttttttgaaaaaaattctctcaaaactagataacagtaagcatacattcaaattggttaagtcctcgatcgattagtatctgtcagctccatgtgtcgccacacttccacctcagacctatcaacctgatcatctttcagggatcttacttccttgcggaatgggaaatctcatcttgaggggggcttcatgcttagatgctttcagcacttatcccgtccgcacatagctacccagcgatgcccttggcagaacaactggtacaccagcggtgcgtccatcccggtcctctcgtactaaggacagctcctctcaaatttcctgcgcccgcgacggatagggaccgaactgtctcacgacgttctgaacccagctcgcgtaccgctttaatgggcgaacagcccaacccttgggaccgactacagccccaggatgcgatgagccgacatcgaggtgccaaacctccccgtcgatgtggactcttgggggagataagcctgttatccccggggtagcttttatccgttgagcgatggcccttccatgcggaaccaccggatcactaagcccgactttcgtccctgctcgacttgtaggtctcgcagtcaagctcccttgtgcctttacactctgcgaatgatttccaaccattctgagggaacctttgggcgcctccgttaccttttaggaggcgaccgccccagtcaaactgcccacctgacactgtctccccgcccgataagggcggcgggttagaaggtcaatacagccagggtagtatcccaccgatgcctccaccgaagctggcgctccgtttccaaggctcctacctatcc

SEQ ID NO: 2 - DNA, 1074849 bp, Bacillus subtilis
gtggtagccgaagccaccttttatgtctgaaccatgcggttcaaacaaccatccggtattagccccggtttcccggagttatcccagtcttacaggcaggttacccacgtgttactcacccgtccgccgctaacatcagggagcaagctcccatctgtccgctcgacttgcatgtattaggcacgccgccagcgttcgtcctgagccaggatcaaactctccgataaagtgtttgactgactacgcacatcgctgtgcgatttatttaaaactttgaattaacaggtacgttttgtcttgtttagttttcaaagatcattaccgcttgttgaagcagctttattatcttaccactcagcttcttttatgtcaacaacttttttcaagttgtttccgaagcttttcgttgttgtctgctgttcatcagcgacgtttaataatataacacccttttgaaaatatgacaatagtttttttaaaaaaatcattaattattttctttcatacttatttcagtttctcttctatagaaagataagctgtcttgtggtttggcatattttcttgtatagtaagattgaactaaatacttgatgaccacaaggggagcattaaagctgagagtgaacgttttgttctgaccctttgaacctgttagttaacgctggcgtagggatgtggcaaagccaaatgatttgcagtttatgcaagcagcgcgcggaccttttcccatccttccccgcgctgcttttttgtttatccttgttacggttgtctgaccagggggaaaactatgaatcattcaacacagcttgtgcgcttaattgaaatagcgattatgaccggggcggctgtcattctggacattgtctcaggtatgtttctccggatgccccaaggcggttcggtctctattatgatgattccgatttttttgatttcattccgctggggagtgaaagccgggcttacgacaggctttttgacagggattgtccagatcgccatcggcaatttgtttttgcagcacccggtgcagctatttcttgattacatcgcggcatttgcagttctcggtttcagcggcttgtttgcttccggtgtacgagaatcggcattgaataaaaaaagaggcgctttaacgatgtatgttataggcggtgttttcatcggcagtgtgctgcgctatgcggcacatgtggtctccggagctgtctttttcggaagctatgctccgaaaggcacgccggtatggatttattcgtccgtctacaacgcgacttatatgattccttcttttatcctttcggccattgtccttatcttattattcatgactgcgccgcggcttcttgaagctaagcggacaaactgaaacagcaggcggtttacgcctgctgtttttttattcctggctgtgctgttcgtttgaatcactcagttcttttgtaagttcatttatactttgttttatgtttcctttgcctgaaaaattctcaataagctcttttacattgattccggaagatgcttttaagctttcctgaagaccggccattaaattggttgcgtagcctgtgactttattggccccgccgttttcaccgcttcctcccgtatcaacgacggttattttatcaatgttggaaagaggcgctgagacttgcttcgcatattcaggcagcattttcacaatcatatcaaggattgcagcctgcccgtatttttcgaatgcttcggcgattttttctttagcttccgcttctgcgagacctttcaggcggatgacttccgcttcggtttctcctctcgccttttcagcctccgctttagcaagaccgtcaattctcacgcgttccgcttccgccttggccatcgcttcgatgctgtactgctcggcatccgcttctgcgagctgcttcgcttttgcggccgcggccgcttgttccaccgagtaacggtcagcatcggcttttttcttcacttcagagtcatattggcgctcacggcgcagaatttctttttcttccaattcaatctgcttttgcctctcaataattttaatttgcatttcctgctctgtcacctgctggcgggcttttgctgtttcaagatcatatgcctggtcggcattggcttttgctgtatcctgctctcttctgtattccgccattttcagctgattgattttttccgcttcagctatttccgtcgcccgctccagctctgatttttttgcgtctttatcagcggccgcgcgtttaatcctcgtctctttatccgcttctgccgtggcaatgtccgcatcccgcttgacttgggcgattctcggcttacctaatgattcaagatagccgtttttatcgcggacgtctttaatcgtaaaagaaacgatcacgagccccattttagcaagatcctgagacgcgacccgctggacttcctgagaaaacttttccctgtttttataaatctcttcaacggtcatggagccgaggatggagcgcagatggccttccagcacctcccgcgcctcctgctcacggtcttccttggatttccccaaaaattgttcagctgctgtggcgatttcaccgatggagcctccgattttaataatggcggttccgtcggccattaccggcacgccttgctctgtatagacttcaggtgtagagacatcaagtttgcttgacagtaaactgagaggttctgcctgctggaataccgggagcacgaacgttcccccgccccggacgattttcagacgatttccgccttcatcaatgtggacgttcttatttcccaaataacttccggtcacgataagggcttcgtccggccccgccgtccggtacttcgtaataaatacagcaataagtgcgatgagtaaaaagaatacgattccgataacgatgataatcggcatagtcataacagttcccccttagatatcagattggttcatgcggcgtcacaaaaagcactccgtctttcacgtcaatcactaatacggcagttccgtacttgatctgttcttgatcaaagctgacggctgatttagaaatggcgccccctattccctctatgatcacttctccatagccgtctttcgggacggaagtaatgaccctgccgactctgccctttaaatccgtctctcgataagcgagcgattcttccgctgatgaaagcgggacaaggacgaagaagtgaagcaggctgaccaaaagaaccgaaagaacaaatgaaagcaacgcaatgacagaacttgatagcggagcggcgatttcgccgatataacctgaggctgaaaagattgttaaaaaagacagaatcaatgcagggtttaaaaatgaaacaggaatggcttccgagaggccgtgaaacacatcttgaaaaaacagaatcaaaagcgtgagacttcccgaaataatcaatgtgtaaagatagaccgtttcaagcggcagatgaaatatgtccatcttctatcctcctttcagccgatgtgtcggagtgttactttatatacggatgtaaaggtaaatggtttcaattttctgataagggaggctgattacatgattatccaatccggatatgatatgtttactctaaaggaggagataggatgagcatttttaatgaagccagacagcagatctgggaagaactgaaaggactctctgatgaggaattcaaccgaaagcccgcggctgatgaatggagcgtgcgggaagtccttgaccatttaaagaaaattgacgaaacagcgcagacccttttatcaaagcaggcaaaagacgcaccgttaaaagaaatagaagaaaaaccgatggagtttatagaggacagaacagataaacggccggcgccctcacacctcgaacctgagcaaaaccgattatcagtcattgaagcaaaacaggaattagatacggcaagacagcagctgaccgcagttatttcatcattaaacgaggaagactttgaacgtgtgcttccccatcctgtttttcaagaactgacgatccgccagtggattgattttatcggccatcatgaaaagcgtcacattaatcaaataaaagaaatcaaacaaaaaatcgaaaaggtctgagtcagaccttctcgatttttttcttggcgcgtttcggttcataagaatggatggtgaccgcatcgcccgtgcatatgtcacccgggcgttcaacaatacagacaattcctcttctgcccatcgcgtgcctcacaaacgccgcggcgagttttggctgatccggataaaaggattgaatgacttctcccggctgaatgcacggatcattttctccctcacacaacagagacgcaccgcttggaaatatcattctgcttccttctttaagcggcgtcagtgcagaaaaaccgctgattgcgatattagcgccgagccattcgggaaagatatgagaaatccccatcttctccgcaatgtcatcacattcctccatagacacgattgaaatctgtctccggttaaaaatttctgttcctctttcatacatcggctcgcgcgcgccggccttttttgtcagtccgaaatgcaggtcaccgggaaacccgccgtattccgcacgaagcttgtccatctttttggtaacaaattgttcggtatccgctatatatacgccttccgtctttgctgttatgcgtttccacattagccgccaccgcctttttcttgacattatccttaaaaaaccccgctctgtaaaggagcggggttcatttattataccgttttcggcgttaagtcaaagcagcgtttgtaaatccagttgtatgctttctcattcaaatctcttggatttccgaaagtttgcggatctttcatggcttcttttgataaacgttcaatcatgtccggagacacaccttgttcttctaaactcggcacctctaaatcttttacaagatcatacatccagttgacggacgcttttgccgcttcttcggttgtcatgttgcttgtatcgattccgaatgctttggcgatgcgggcgaatttttccggatagcctttccagttgtattccattaccggccccatcatagctgcgacgcattgtccgtgagcgacagggatgatgccgccgagcgtctggctcatcgcatgcgccgcgcctgctgattcactgccgtatgaaaggccggcaagcatcgccgcctgcgccatgccgtatcttgcttccaaatcctctccgtccgcaaacgcgcgcttaatataatgcgccgcatattcaatggccattaaagcgacggcatcagtgatcggctgcgcgaatttcatcgtatagcactcgatggcgtgcgcaagtgcgtcaatacctgtcatggccgtcacatgcggaggcatggacgtgtgcagctcagggtcaatgaccgttaaatgcgcggcgataagcggtccgcccgtattgaatttaaattctctttcctcatctgtaatgaccgcccattgtgtgacctctgaacctgttcccgcagtcgtcgggatcgttgtcagcggaggaatacggttttccagcggctttttgccttccgcggcttcataatcaagcacgcttccttcgtgtgtcgcttctaccccgatcgctttcgctgtatccatggagcttccgccgccgacagccacaaggccgttgcagttttcttttttatacagttctgatccttcgtttacaagacgtacaggcgggttcggctccactttgttaaacaggacgacttcgatgcccgcttcctgtaaagattcaatgaccgggtttgccactcccgcgttataaattcccgggtctgttacgagcagcgcttttgtgacgccaagcgctctgacttcacttcccgcttgctgaatcgcaccgattccgtgtttaatgactgtcgggatttcgaatgtatggaatttatgcatgctttctactttcatatttaatgtcatattgtatctcctcctcgttatgcttgaaaccagttcacagccgctggtttcgtgttgcggtaaatatgtttgatttccgtgtattcttccagaccgattttgccgagttcgcggccgaagcccgattgtttgtacccgccccatggcgcttgcgcgaaatacgggtggaaatcattgatccataccgttcccatccgcagtttggcggctacgcgttcgcatttttcaatatcctttgaccataccgctccggccagcccgtaaatggtatcgttggcaagtctgatcacttcttcttcagatgaaaatgactcaactgttaaaacggggccgaaaatctcctcttggactatccgcatatcagacttgcagtttgagaaaatagtaggttcatagaagaaaccgttttgaagggcgggatcatcaggacgtttgccgcctgtttccagttttgccccttcttcgataccgatttctacgtatttttcgactttggcccgatgctcggcggaaatcagcggaccgctttccgtatcttcatgaaaaccatttcctaatttgatgcgtttcgtgcgcttgatcagctcggctaaaaattcatcatgaatggcttcgtccaccaaaagacgtgaccctgccgaacaaacttggccggcatggaaaaacacggcgttcagcgcttgatctgcagctgtttcgagatctgcatctcgaaatacgatattcggatttttgccgccaagctccagggcaatctttttcacattgccgcttgccgcctgcatgatttttttgcctgtttcaattccgcccgtaaaagagaccaaatcgacgtcgaggtttctcgccagctcatcgccgacagaggcgcccggccccagcacaagattggcgacccctttcggaataccggcttcttctattaattgaaagactttaatggttgtcagcggagtaatctcgctcggctttaaaacgatcgtgtttccggccgcaagagcgggagcgattttccagctcgcctgaaggagcggatagttccacggcgtaatttgtccgcatacgccaattggctctctgacgattttacttacggaatcgggaatcggagatgaaatgacctcgcctccgtctttatccgccaaaccggcataatattgaaatacatttgcgatatcatccatatcggctttactttcttcaatcgtttttcctgtatcgagcgattccagctcagctaattcgttcagatcgcgtctgattaattccgcaattttcagaacaaattgtccgcgctcgagcccggaaagcaccggccactccccttcatcaaatgcttttctggctgcggcgatggctttcaccgcatcgttccggtctccttcgcataccgttgcaatttcttcttgattaaatggattaatgatacggcgggtctgttttttttctgcactgatccattcgccgccgatataaagcgttttgctcataagagtcctccttaccgaaaagtaagtttgttaaataaaaatttaatgtttttaacaatattaatttaacacatgtttttttgcctgtcaaaacccggtcagtccgtttagattttgacattttgtcatgattcgttaagattaagaacataaagaaatgacttaacaaatttaaacttcaagaggaaaagagggacagtatggatgagaatccagaaatcgcagctatagaacaagccagggatcttgtcattgattccattgcagagacgatggatctttacggaatcacacggagtgtcgggattttatacggaacaatgtatatgagggatgaaatgacgcttgacgaaatgcgtgaggaactgcagatgagcaaaccgagtatgagcacaggcgtcaaaaagctgcaggatttaaatgtggtcaaaaaaacctttcaccgcggcacacggaagcatacgtttgtagcggaaaaagatttctttacgtttttcacgaatttcttcccgccgaaatgggatcgtgaagttcaggtgaatttgtccgccatcgaacaggctcaggcggatttgcagtccgttttgctggccgaggaaggcaacgcggaattacaggaagaagcgcggcagttatatgatcagcttgaaagttcgaaagcttactatcattggctgaagcggctcgctgactcggttcagagcggggaaatttttaaatttattccgatagaaacggacgaaaaaaacgcctgaatcaaaatcaggcgttttttgtcgtgatttgattatttttgagaaaatataggaacataaccccatttacttccattaaaattgatggtaaatttttataggtatggtcgttcttttttaagaacaatcaacaaattttttttagggggatttatgaaaatgaaacagaaatttttctcaactgtcatggcaagtttattcggcctggttttgcttctttctctgccgacagcgtcattcgccgctgagtcaggctcaaccgttcacgagccggaaatgtccacgaaagcgactgctaccttatttgcaaaatatacaggtgccagccagcaggaatggtcattttctgatatcgaattgacgtaccgtccgaacacgatcctgagcttaggcattatggaatttacccttcctagcggatttgcggctacaacaaaagatacagtcaacggacacgctttgcgtgaaagacagattctgaataacggcaaaacagtcagacttccgttaaacattgatttgctcggcgcagcggaatttaaactttctcttaataataaaacattgcctgctgcaggtacatataagttccgtgcagaaaataaatcattaagcatcggctctaaattctatgctgaggacacaattgttgttcaaaaacgcagcacaccgccgacacagccttgcaactgcaaataattgcgaaaaacggaccggcacaagcccatcgcttgtcagccggtctttttttgtgctgttttctttcttccggccctcgcattgacaaacccttgaaacaggagtacattcttgtttgttgtatttggagtgacgaaaacagtttcttaaggagttatgaggattgggaaaaatcaaaaataaacaatttgccgtcatcggactcggccgtttcggcggaagcatctgtaaagagctttttaaaatggggcatgaggtgcttgcggtcgatatcagcgaagagcgggtcaacgcatactcctcttatgccacgcatgctgtgcgggcaaattcaacggaagaaagcgagcttcagtcgctcggcatcagaaattttgaatatgtcatcgtagcaatcggcgccaacattcaggcaagcacgctgacgacgctgttattgaaggagctgaacatccctaatatttgggtgaaagcgcaaaactattatcatcacaaagtgcttgaaaagatcggtgctgatcgtattatccatcccgaaaaggatatgggcgtgcggattgcgcaaagcctttcggatgaaaacgtcttaaattacattgatttgtcagatgaatacagcatcgtggagctttcagccacgagaaagctgcatttaaaatccattcttgatctcggcgtccgggccagattcggctgcagcattctcgccgtgaaacataatggagacattcagctgtccccttctccggagactgtcattcatgaatgtgactgccttgtgctgatgggacataaacgtgatattaaaaggtttgaaactgaaggaatgtaaaaaagccggcgggctgccggctttttttgatgcttatgtttcttcacttaactggacggcggtttggtcaacccagccgatcagctcatctttcacttgaatttggtaccagacggattctccgttttgtttttcagatacgactttaatatgctggccggtaaacttttgcgccgatgccagtttaatagaatgccgctctttcgacggcttggaccacacgtcttcaatggcgtggtctttgatggcgcctttcatatcaactgctttaagagaggcattgattttgtcatattcattcagattataggtttctatgacatctttaattttttcagcatagccggggtctgtggcgtagccggatttttgaagggcagccgccgctgttttataattgtccgcttcaatgacaggcttatacttctttttattccaagacgttccgttgacaaataatttggcatggtcatccattgattcaaaaaacgtgctgtatttacggaattttgcccgaatcgtttttctttttcctttttcaaattcatccgttttcatcgtgacgtgttttcctttataatcaccttttacaccgaacaggttgcgcgctttccctgcaagctcactgttcccccagtccgattcgagaatggcctgtgcgagggtgatgctcggaaggacatgatatttctcatataaaatttgagcatgcccggaaaggctgtcaataaagacctgctgctcgtccacctcttcaggcggtttttcttccgtcactatgaatttcgaaaacaccattgataccagaaataacccgaatataagagatacagcaaaaaggcacccaagcacccttttggtctttgctttctttttcatatcaaccttcctttaattccggaatcactagatttataattttactggtcattgatgaaaatttcaataaaatagggaaaaagacggagaaagaacacattgtgcaaacaaaaaagactcctctttgaggagtcttttttgttatgccatgctcagctgagggccgaacaattcatattgaacggaatcagagtcaaacccgagagcaagaatcatatctttcatttgcgtcataaactgcgctgatccgcacaagtaaaattcagcatcttgattcagatgaagctgctccaagaaggtttgatcaatcctgccgctgtaaaaaggcttgtctcctgagcggtcttgttctgccggttcactgtatacataaatgacgttaatattcggatgattctccgcagcttgttcagcctctttgcggaacgcggcgtactctccgtttttcgcggcatgaataaaagtaacggaacgctccggctgtttttcggcggctgttttcagcatgctcatcatcggcgtgattccggaaccggcactgataagaacaaccggtttttcggcagaagacagcttgaaatccccggcgggtgcgctgacttcaagtttatctccctcttgaacttcattgtggagatgagaagaaaccgctccgtcctttttcacagaaatccgatatgcccctttttgagaagcatcagacaggctgtactggcgaatgtgcgtataaggagaatccgcaatccgcactttaatgctgatatattgtcccgcttcaaatccaggaagcgaagagccgtcactcggtttgatataaaatgatgtgatgtctttgctttctttcgttttctgtataaccgtaaattctttatacccctgccatccggcttcattgtacatgtctttttcaatgccgatgaaagcctccgcaataacaccgtaagctttttcccatgcctgcataatctcaggagttgcggcatcctgcagcacatccttaattgccagaagcagatactttccgacaatcggataatgttccggttttacaccgatgcttgtgtgtttatggccgatctgtctgaccgccggaatgatttgttctaattgatcaatattcgccgcagccgcaatgactgcatttgccaatgctgcgcgctgagtctgtttcttttggttcgtttggttaaacatatttaacagttcgggatgatcttgaaacatcaggttataaaagcgtccggtgatgttttctccatgtgtttgcaatacgggtactgtgcttttgatgatgtctattgttctctcatccagcatgttaatcctcaacccttctaaagatgtattttcaatatatctttatagtaagagatatttcgaataaaagatatattgaaaatgaatctttaaaaaagtcgtcacaatattgtgttggatttggaatttatggatttcacctcctttttttatcacccggtgaaacagggacacatatatttggaaatatacgtttaaagatgaaagcgggggagtgcatggtttccgatatcgattacacgtctccgaatacacagttcacttatgatgtgaatgagagccgtttttttacgaaagatgctcggaactttatcaatgtattggggattaaacagttaaacacgcttgaaaatatttcattattagatatctttctgagcaaaacaaatgtgattgaaccgcatacccatcaaaacgccgctgaattggtgtactgtatttcgggttccgcggtggtgtcgatgctgaatccgttcacccagaaaatacggaattatccgatctcttcaggacaagtggcgaatgttccgcaggggtggtggcattatgaagtcgccacttcagacaaaacccaccttttggccatatttgacgccccttcgcctgaagtgatatacggctcggatattctccgtctgacgccgcctgagatcatggcgcatacgtactgtctgaatgagcatgagtgggaaaaagccgtttcaccgatccggcaatcaactgtgataggccccgataaatactgcggacagactgaaaacacggggattcatgatatgaataagccttatcagccaaatacgcattatccgaatgatccgtatcggcattatgatacgccgttatattggggatattaaacggagagccagagcggcatcgacagaaagagcccctcattggagaggggctcttgatcattacggtccggttccgcagcttactttgtactcgccttcggacgatttttttgaataacatacgtgcggcgtctgtccggtatcatctttccaattgaaccaatttacataataaaggttcccggcctctccgctgccttcttctttttgaagaatcgcaaagtagctttgatacggatatccttttttataaatgtcatgcctgatggctcctttttctgaagcagacgtgaagacgacgggagaaagagccgggagcgctgtcaaaaaaagcgtcagtgcagctgacagagataatataagatagattttctttttcatttttctctctttcctttattttgagttgttagaaatgaagcggaacacagaggctgctgcagaggatgaaaaaacaaaaaaacccttatttatagaataagggtttaaaggtatggagccaagggggctcgaacccctgacctctacgctgccagcgttatccctgcatactttctgatattctgacgtaccctacaaacgttgatttaacaggctttatagtctttttaatcctttttagtactttgatgtaatccgttataatcaggattttttaaaaattttgttgccatttttgttgccatttttatttatttagccggttcttcataaatgactgtatagactgtttgaacataacctgtcacatcttttgaatcagataatttaatatcaatgattttcatgtttcgtttatgtaagtcctcaagcgtgccattcaacttgtctttctcaacatcagtagccacttgtacaagtccttgcttttgctctttttcattagagtctttatcactttttttcactaaggatggttctccacaagcagataataaaccgatagataaaagtcccacaattagtattctcttcaatctaatcacccccaatggcattatactataatagacggcatcccgtttcgttactccatcgttctctcactctgcatttttgcagactgaacgattcgtgcacccagccttctgacatcgtgaaatgcgactccagccaatgtttagcgctacgtcaaattgaagattcgatcatctattgttcaccgaaattttcggtaatcatttcgtatctgctcaccttttcggaatttccgaaatcattttagagttgatcacgcaaattttacctgatcatattgtgttttgaattagttcgtgacaaattgtcacaattaaacgatatcttttagtcgtgcaaattttgtacgagctctatgctcaggtcaatttgaccttttgctctaaagaacgcatttttgcgttattaaaatacaatttgttctaagggtgggaaaagtccactttctaaaattctgagagcgcaaagctgctctttctaaaatttggtgaatccaaaactggatgctcgtaaatttagagaacggagctttccgttttgatgcaatgtcgttgttattttaccaacgagcataccgaggtcgtggttgttttgtctacgaccttattgtggtctggattgagtcgttgctaatttgtcaacgagtgatataaggtcgtatacgtattggcccaactattacaattggcaatagtctcagcccccaaagttggggactcctcaaaattgaggagtgacagatatagatgattaagctctgtttcgttccccagaattggggaaccaatggttcatttaagtatatagataataaccatatatacttaaccaaagggtctggttcaaatgaacctcacaaacgccccttgtactcattcagcagcgttcttcttttcgcttggttatagatcatatcgtaccgtattctcgcctgtctacgttgtgatattgttaacctcttatctcccatcatcttgtgaaacatttctaagtcctcgtgctccttcttggttacagtcactttcaatcactttaacctccattcatcgtcaaaacttttgttattagtcttgacttttcttttgattttttgcttgattggttgagactgtggacaacggctggacaagttgtctgcctgaatttgcttgtaaaaaaataaacaaactcaggcaggcgactgaaacttgattgtatatcaacttgtggtatccgtgtgttcaccctatttgccgttggttattccccaaacaagcctactgtgtcaagtgtccctaacaggttcagaaagtccaaaattggactctcctacttatggcttgtcctgcatcgtcagaaacgatacacccttccttcgtcagcacttaatggcagctttcgcctttcagatgcatgtgtaaatagggaaacacagaaggcatcctatcctcatttattgcgtcggctgagtcactaccctgtcaagttttacgtgtgttagcgcattccacggcagtctgacccttaaaaaaggcatcactaaagacaacaccttaattcaggagtatagactgactgtattcagttaaattgaaattataggggacagggagataattccccgtcctctctgtctatttaatcgtctgctttccacaccgtgaagatatcgacatactcacttttaaggaaagcaagctcactgacttcagataccatacattcaataacatcaacggtaggacatttcttgataatccactctatgattgaataaaggcgatcattgtaattgcatgtaaacctttcttttaacaatttatttcgcctatcatatgctttaaattcataagtggtatatgtgtttttcatttcagttatccccttgattaaattgtaatgtttaaatacaatgggagtgtactaacccatcagattaggagagtgctggtgacactcttcctaatcacccaaaccaagctatacacaatatgcttaaagctggtacagctacgatcaatcccccaaatacaacctgacagaaccgctcgttatgtaaatccgtcttactcatcttcatctacttctaccacagttgctttttcatctatgtaaaacacattgtctgttatagttgggataactgttttacctccccccatatccaacatgatatgagggaaattaacacccatctctcctgcttctactaacgctgctattccgtctttccgatcattcccatcaagttcaacacaaaccggtattgtcatatctgtgaagattctgagacgctttttaggtttcccatcgtcgtatgtttcaatgaagttgtttttttcttcgaacatcttccctctgaagtaattgaaatgattcgtcatttcctcgatgcgctgttcgtttgtgattgcccctaagcttgctacgttagttcctacagtgtgacggttaatttgcattgtcgttatcccctttagtaagttttgtttttatctaagatttgaaattcatcgtaaagatcaaacaaggtagggtctgcaataaatacatcccacaaagtcgtattaaacaatttgtcaatcactgcgtttgttagacttctaaggtttttgtatttaatgtccttagcaagataggtacttgtcagggtgtcgtacaatccgtcccctctttttaaaacttgatacaggatgacttgaccatcatccccggctattgcaaactgcttgtaaaacaacattgcgggtaaattatctgacccttttgtgcggatgattatgtgtttcattccactcctcctccgttagtaaaactcaatttgttttacttgttgagtataactatatagtttaactcattctttgtcaacaaaaagttttacttaatgagtaaaagatattataatacaattaacaaccgtatggaggattcgttatgaaacaatctggcaagtccatgagtgattttaagtttgtaccaacactcagcaaaacattgaaagaattagatgatttaacaaggaatgctttagcagttgaagcaaaagtaagaccggctacaattaacgacattgctagtgggaagtcaaaacaaatcaacatggaaactctcaatgcaataattgaaacactaaacacatttgcaaaagaaaaaggacttgataagaaatattctgtttctgatatatttgaacacgaagatttccttaaccaaaagtattgcgattaaaaaaataatcgttaaacaaaaccattgaaatattcaattgtcgcaatttgcgacgatcaaaagtattgcaattgctgttatactgtacggagaggtgaatgggatggaaaacaacatgcttcaagcgatattagatgagattaagaacgttaataacaaggttgatgggatagcttccgagttgaattcctttaaagaagatacaaagaaggagtttgaacaaatcaatcagaagttagatcgaatggaggaaaacgaacctgaggaaatcatgtcgatgctcaaattaatcaataagaacattgagcgtgatcaccgatacaatgacaaaaagttttctgaaattgaaagacgtatccatgatcttgaagagagattgaataactaagcataaacggtatacgtataccgatttgtgacaacataaggggatggggttaatggaaaaagatgaagtattgcgatatgttgaagataaaaagactttagcattgaagaaagcaagtcaagttcttggtaaagaaaccaattgggaaagctttaatggaattataggcgggaaaaatgatacatatagtttaaatatatgtgaccatgaaacagcagagagctatgtaaatgcttggttatccagccatcaaaagatatacaaaaaagagataaatgcatcatacaggaaatcatcccacaaaatacacgatatgttacaagatgatttcttgaaagagtatattaccatgttcctagctagatcatactttaagaataaaaaataaccactttccatacgtggcaataaaaaagaccccttcacaaattgtgagggggttatttagaagaaaactttcccttcatgtcatatccaaaatgctaaatcgtggtaaaatataaagaaaattcattattgaactaaggaagggaaaaatgactgaattatatgatttcaagacgcttgcaatggaatatccatccatactagacaacctacttataggtaatggattttcaattgaattctataataattttagatatggtgggttatatgattatttattgagaaaccaatttctaaatggtcaagaactagacttatttaaagcatttgaaacgactaattttgagttggttttaaattcacttcacacggcacaaaaaattaatcaaacattatcaatagtcacaaattatttagatgacaggtataatgaaattaagaatctactcattaaagcagtccaagatatacacccattatattcacagttggacataccaaaattagcttggagtctcaatgtatttaaaaagagtattttcaccactaactatgacttattatcatattgggctttattaaaattaaaagacctaaataggaatatacgagatggctttttctacagaaatacgagcgataaaacactgacttttcaacctgatacctttgaagaaaccgaattaaagctttttcacttgcatggtgcgcttcatttttatgaagatcaaggagaaatcataaaaatcaaggccaaaagtgaatatttactcccagaaattaaacaaaagtatgaaagtggatattttcctgtttatgtgtcagaaggggtatcggaaaagaaacttgcacaaatccatagtaattattatttaagttattgttataacagttttatagaagctgaagggggcataacaatattaggccaaggacttaatcctgattatgataaacacttgatagatgccatactacgttcaaaagtaaattgtatagctttcggagtttatcccactgaaagtgatacaagtcaattcattatagagactgtaaaaagacaatttggcaagttagatggtaaacagctcatattttataattcaaggactttttatgagtatacaaggagaaaatcttggggccccttactagcaccaattaataatgagtacttcccaatattttaatgaataaaaacagccctatccggttaaggatagagctgtttttattcttgtattgttgttaatactccattgtcgaaatataggtatctgctgccgtaaacccattgttcgtttattcctgatgctgtcgttgtcttatgaatagacataggcctgccccaatctttaagttggataacttcctgcttggtcatgccaatagcaattgtcttctcctgatattcttcattttcagactgttcatcatcattttcgctgtatgtaacttctcttctttggaaaccagttgattcaggattatcatctacacgatcttttattagtaaagtgttttcttcaggggtatttaatggatcataatcaacttcatatctaagtaccttatcgtgtttatccgggtgaacaaaaatatgagctatcgaacaaaccttgtctttcccacagtctattttattcaagttggagtttttctgcgtaacttccattacttcacccactttaagtaacttttctttatccgataactgggtgaaagatggcttggctgctaaaactaagtcgtatactttatcattagatttatcggttttagacatccacacctgattaaagtttttcttaactcccttatcatttcccactttctcagcaattgtgtctaaattactggtgtccaatctgtttatgtacatcggaattgttatagctagaataatagcaactaccacaacactaagtgttgatattagaagtatgatcttcttttttgacaaattaacctccccttcccatctttacttattatcggttatttcactcactattccaacaaaaaaaagacgtatccaataaggatacgcctgtttagttcacatgcctatatgcttcccatatatacttgatgtttaatttattccctctttgattgctgtctgagcctgttataaatcctagtgcatttatgcttccgtaggtagagtttccgccaattagggatattcccatttcatttacctgatacatataaccccctgtctcatcaattaatagcatggattcattggaagacactggccacactttcatatgtgttggagtgaaaggcagcaatatctgtttactaattgttccatcgcccacatacgttcctttagccatctgaggaacatcagaggatagcgcatattctgagtgtagtttacccccaagaaactcagcgttgccatctatggaacctataatgattccttggtcattacgtacaggtattgtattaggcgtggatagcgttgaagtcgtgtaaccatttaatgaatcagccgatcccgcagaagacacaatccactcttcaccattgaaaagctcttgtttattagtctttggatcgatccaaatcgttcccgcttctggagtttcaggcttcgctactgatgatatagtatacaaattgtttacttttccattaaggtttccactcacctctacagtagaagaagggaggtaggggttttcgtttgggtgaagggattttacgatgtcagatccaataaactgagttatctctatatctgcatcaactcgtcgataggcttgaatgccaatggtgtagtatttattagagggcaaccctgtgaacgccgcagctcgtttgtcatactttacattcttcaggtcttcactggccatctttgaaccgaaaacatattcatccttatcgttgctagaatatagatacaattcaaatccatcaatattatacttgtcttcatcagaagttggataatcccattctattgtgatatctactgatccatcatcattgtttgtatgggatatagccgtgccgtcacctttaataattggagggtcaggttttacagctattctgtcattcctaatgttgaaattttcagttgcattctcccagtcaatttttcttttgttataatccgtgtttgtttttatagatgtatacatcatattactgatggtttcaaaatcgcttttaatcttctttccatttgatattgttacatccattgtcttttgagcaaaatcaaaattaaatgtaacaagtcgagctttcacatcagtcttcagttcttctgatctgattctgacagtatcgccaagtgaacacctatcccagttatgagattcagaaagacaattgaaaaagttaactacatctaaggtaatgttaattggtggcgcatttctattttccatctcctctatgctcttttcataaagttcagtttcatcaaatacactatcattcgaccattctccttccagaataaaaactgaaagttcttctttaagatcgtctgtaagatatttttcaaatttaagtgtttctttaagctcagaaatggaattttggattgtttccttatctttatctaagatagcgatctgattaatcttggcatcaagttcctgaattttcatttgtaattgggcttttaattctttagtgtcatcccctgcttttttagctacttcaatatggtctaatatcttttgtttttctagttcgagtgtgtactgttcatttttaagcactgttttcttttcttcgacttgtttttgctgttcaagtaacaggtgaaatttattcccttgtttattcacaatcaaattgtaatccaggatagcatgacaaagctcattcgacatgtaattacttttttggattacgtttctgttttcatcacgattaaatgggtaaaggaagtatgagaaatcatctatatatgcttgcccagtcggatttaccgagttaatgcctattccgtctttccctgttggatatagtcttgtggtaacttcctctgtgtcttctatatcatttatgtcaactatatactgtcctgttttaaaccataatcctttgtacgtacctttatcagtatctttataaaaactcactgtcatattttctgtattaaaaagaggtgttgctccaaacttttcacatattgtatacagtaaatctaatttagtcgaagatgtaacatcaaattgcctatacttagtattcaattctgtatcaatatgatctactttccatccagtgtttttaaggcaagaattagctgcttcttttaaattaatcgacgtttcttcaaatctccgcactttgtatttggtaagcaaaaaaggcaaagacttgcattcgtatatgtaagaagctccatcctcgttcattgattttgttcgttttgttatcacaaaccactctgtcatcccataaaattcagctttaataagataccatggtttcaataattctaataaaggattatctttgtatctgtggaaatacccccacttcaaaggaacagagaaagacaactcatgggttttcccatagttcattgtgattgtctcattgaatttatcgactatgttccctatcttcttcctattgggtttcattaatgctaatcgaagatctttcacctcagtatgtttgcttattctcaattaaaaaacctccattcaaattaaaaaaagagccggcattttagccgactcatgagttattgaaatttaaccccttgtttttgaggccatttgtaaattgcttgtacattaaatcaacagctttctgaggattcccagtttctttaatggttactgtaaagttaaagtcgttgtttactgtagaagtctctgttttgttgctaacaagagaatctggaacgtttgttttaacgtttgcgcttaaacttggtattccaaacttaccaccagcaaacgaaacatcactaagaaaatctttatacttacttaaatcaggctttgcggaaggggcaccatttaaatctttttctgacaattcacgtacagtgtctactgctttaagcatatttttggtgtctgactcatttaagatgagttctccactatccactactgcgagagcgcccgacgccggtagtttacctacatgccctccagttttaaacctggcaaccttttgaccagtggtattgcccttggtcacagtattcagggcattagaggcttctttaagcttatcgataaggttattggagatacttttcccaatagactccatattgctgttaatgaacttagagaattcattaagctgcttggagatgtcagtgattttgccgttcatgagtttgtcttcaattttcttgaattctctctcatcatttgtcaggttatcatatttgtcatttatggcatcctgatctttttcaagttggtcttgaagtgcttccttacgtttcgtattactacgatctttaagaaactcatctaatgcttcttgctgttcttgaagttgcttttctaagtcttttacctgtgattttgcttcatctgaatcatcaagggataatttactgatcttttctttggtttcctgaatagcctgattcttttctttgagctctttttggtatttagcttcatcatcagttttatcaatctcatcaatcaagtcttgcgtagctttttggtgcgcttttaattcaatatcacgcatcttttcgtacatctctttgtatatagagacaacttcatcagcaagggatttatagatgtccttgatcgactttttggtgttataaagctcaagattaaagtctttctgtttatctttccaattttcgatctcatttgtaatttgctcttgtatttccggaaatcctttagctgcctttttctgttcctctaattgcttgatgtattttttagcctcagcctgttgttgctgtactaatttgacttgctgactataatatttgaccttatccttgtctttttcagtcattgatattttattgtcaacgtctttgatcttggattcagtcttgtttgatgatttttgaattgactttaaagtttcatctactttagattgaactatttgcccttgcaattcccttacttgctcttggaagttaataaggtctattttagcttgctttagctcttctttaagttgagctttttgggctgaattcaaattcttattagctgaaatttctttttgtatccatgaaaccttttgactctgaatcttttgctgctcagccattgcttttttctgttctgcagtatattttctaaactgtttactgtctgacagataatgacttgctaaggcttggttcttggcaattgctaaatcatagtcaccaatacgcttatcaaactcatcaagctttgactgtacaatttcgtattgaagctcttctatttgttctccaacagaactgatatcaccttggagggagaggaggtcagatttcgcttgcgctattgcttgttgtcgttctgcttcagcttgggatgcatctgaaatagatgtaccgacaccttttaaatacttctcagggtcaaccgtctttccgttttcctcaatttgaagatgaaggtgatttcctgttgaattacccgtactaccaactttaccgatggtctgaccagctttaacagtttgaccggctttaacagaaggggtatcaagcatatgcatatacttagcaacttttccatcatcctgttgaatgacaacccagttaccggcagttttactataaccagctacttgaactttaccactttgcaaagacttaattgcagtaccggcttttgcggcaaaatctgtccctttatgtggggtggatcggtaagcgccatcttgcgcattatatttagaacttattctaaaagcgctgttcttcgtgtagtagcttgcaatggatgaattagcagaagtcattgacttagtgtaattagacatgatcttctgaacataattctgcgtttctttgaaaggagggatgccaccatatttaattacattaccaggccctgcgttataagcagcaagtgctttctcaacattgccaccaaatttgcttagttgttgggctaaatattttgtgccacccataatgctctgataaggatcataaacattgtttacgcctaagcttttagcagtggaaggcatcaactgcattaatccagctgcgcctgctccagaacgagctcttgcattgaatcctgattcttgctgaatcacagctgcaattagcactggatcaacaccatatttacttgcggcagaattaatgtagctggagtatttaccggagtaagacccgccaccggaagatgaaccagaggaaagggaagaggtaactataccgtattgtgcaatgttccctgacttaatttgatccttgaggagtttggcttgctcctgcataagctttttcttttgttggagttctttgatttctttctttaggttatctctgtatttttgagaccattttgcatagtcgtttaacttcttgttttgttcgtcaattacagatgataccttttctaaagcctctttatacttatcagttacataagtagatgttttagtttcttcattagctttctcttgctcgtctgtccatttttcaagggaagtacctgattcgattaacgcttgtttatttgtttcctgagtagatgtagcttcttctgatgctgagatataagcctggatagctgatctcacactatccatctgggatctttcactatccgagtatccaccaggttgtaacatttgtttttcgatcttatgcaattctttcttcgcatcagctacattattaattgatttaacttcaagctgagacaattcagcttcagatatatcgagcttacgctctcttcggagctttctgaggctgtcaatccttaatgtatcagcgtttaaggtcttaatagcgttgttaacctcggttttcattaggtgattgctatatcgaaccatgtcatcatacgcatcaagtttaacttttcgctgacggattacttcatctcggttaacctttataacaccattttcataacttattgctttggctaattctttatctttttggattagagtattagcttcattggcagaaatgctctttccttcagccatcttttctaaaagttcatttaaaggagcaacttgttctttggtgttattaaaaatatctccgttaaggatatcttgaacagagccaaattttattccttcagaaagttctttaataagatccttaatttgactgatatcatttgcatcaagtgcttttttaagcttttgaccgaaatcatcagcttcgttacctgcttcagcaagggtttcacctaaatcaccaacttcagatttaacagatgaaacggctttgtcgccatctttaatgttcttttgtgccttatcaaaactcaacttaaagacatcaattgatgaaccagagtcagcataggtctctaaaagggtttgcaggtctttttttgcgctatcaaatgctttttcatcgtttgaattcaacgctgattgcattttttcttggagtttacccagtgcagaagagaatttttcaagatcctcaggattcaagtcgtcttttagagtaagtttatcaacaatatcagcgagacttgcctttaacgtattgctgatatcaattttactgtaagcttctgcaatggatagtacgctgtccctaacttttgcattaccgctagagatatcattttgaaccctatttatattccgctgtgctttatcagcttccaacttatagtcattttcatctgaaataggactttctaagaaagaccagaaattcttgccttttgaatattctttggccatcttctcatactgcttcagttcgtccttagacttttcaattccttttgaagcgtcttcgaacgtctttctagcaccgtctttcgtctctgtctttttgagctcaagatattctttggtattcttaatagcctcctctaaagccttattactctttagaattgcattaccttgagaatcatagcctttaattaaagccggaaacgattgtgctaattgttgtgtaacctgaaggtattcctgttcttcatcagatgtaagggttcttgaatctttagctttttgaagatccttatactgtttgatcagtttgtctgtagagtctttgttggttgtaatggcttcaatgttggtttgctgactttgttcaaagtcttcttttgctttctttgcatcagcgaatgctgtaattattttttctaaagcaaaaccaataccagcaaaggcaacgcctactactgtagatgccaacatacctctccaggcaacagtaaacgaccttgtagctattgtagctcttgtcattcctgcttctatcccaattgctgctctttgggcttcagttaaagaattcgccccaaaaatcattgctgtttgaagcaaacgcatattcttattaaagccaactacagcaaagtttgctgtcataaaagcaattggaaggaatccgataccctttacagctgaagtaacagctttcagaagatccccaactacagatacagcattaattaaaccatcactaataaatgcatctcctgatgctacagctaattcagtgaacttattttgaagtttatttaatcttgcctgtaagctatctgcgtatttctgttgctcgctccatgcactccctgtggaattagctgcagtggtagctgcattctgtgcaatagagaagttgttcatcattgcattaaatcgagataattgatggatgtttgcaacgccaatagaagtgttttgtttttgggcatcagttaacgtatcccatttggctgctacctcattaatcaactcacttgctgacttagcttctccacccgcagtctttacagaaattccgatctggtctaaagctttaattgagctttcgttattcccgatacgtgcgaaaatggttttaagtgagttaccaaccacattcccagattcacgagtggtacttgcgatggccgtggtgtatccgattaaatcatttaattcaacaccaaatgttgaagctgttgaaccagcttttctaatactgttagccagatccattgtagttacagcatagttgttatcgacttcattaagcttatctgcaattgaaatggaatcgtttgcggcaatattgaagtttaacattgcggcagttaatgtatttacggtgtcatcaggggtgagatcggagacgttctgaaggacttgtgcagttttagttaaagtggagagttcactttcatcaaaacccatacgtccaaaatcaccagtcatttgaagaatatctgagattttatttgatagggaatcccctaattcaatggacgtttgaagaagctcattaaatttgtagtctggttcatccattacacgacgaatgtttgtcatgagcgtatcaatttcaacaacctgagaaactattgatttaagagcagtaaccccaccaaataaagcagaaccggctagcatgtaagcaggcattccagtaaaagcttgctttaatttctcaccaaaactagatacttgtcttgaagatgagcttgcattagattgaatctctctaaactgcatactaagactttgcatctgtctagtaatatttggtgtctttacattgagctgattcacagaattaatatagttttgcaatgctctggagttctcaggactgatagatgttccatacctatccgtcaaagatttaacatttaatttagcttgtctctgatacaggcttaattgatgttctaactctttagttctagcttttaatgctgcagagtcatccaagtgtttcattctgttagcgatctgatctatttgagaggttgttcttgcggcgttaattgaactggatagtctattgaggacggttgaggatagttggcctttttgtctaagctgctctaatttttggtttagtttatctattgccttttgttgctggtcaaagttttctgtggttttaacagctaaagttgccccgtgcctatctgtgctatgggtgacatctttaaactcatctctatatttagtcactgttccggtgacacgacctgttgcatcttgtttcgttactttcttttgagcttggccaagacgctccatttgctgcacaagcttacttgctgcttttgattctcgttccagactctttgttgagttgtctatgattgtccgtgttttctcatggatttcaccgctccgcttatactgctgtgtaagcctagtgatagaaccatctgcatttttagtctcagtaatattttctttgactgtctgattaagatgttttaatgcctcttcactttgcttaaaagcacttgaaaacctttcaagagttcttagaactttgtcatcaaagcttactttgagattcaatggattgattttattttgaagtgtggatatatctttatttaattgctgaacagtcttatttgatgtgtcagccacaggagttaatacaatttttaaattttgagacacttgttctttcacttccttagtaatttttctacaaataaaaaaaagaagtgcctcaaaatttaaagcacttcgtttgtttacttagtgggcttgtgtgcgcctatatagttaacgaacacctcataatgtcttccccagtctctaggtgggtaaagaacttcatactctttgcctttatgaacgactttaacacctttatctaatttttcattaggcgggcagaaaatcatattggttatgtcagttattcttcctaccgcagttggagaactaattgattcaacataaggctgaaaagaacatttgtatggaactagtgtttcttgatcttcatatatgtctgttccccaatcagtctttttacctgtcttcacccttttaacctgaattaaataatatagatcattgaacttcaatgtgagtcaccctccagcagtgatgtaaggggttttaaagctatccaattcaagcttaatatcatcagggagtttgtcgtaatagctttctgaaataccccctcttgtttccgcttttgtagcctcaacaccctttaacctatacttaaagacagctatatcctcaatgacacctagcaaattatctggaatatcattttcattaatctcacagtaattaattacaaaacgccgagctttctttaaataaagttccaaaagagcatcttcagagtcatcagcaatatctaaaaacaacttcaaattagccaattgatccattctattcacctgatttctcagttttcttctgcttctttactgtttttttcttttccttatagccttgttccttataaattaatttaaaggccttttctgtcaatttcacttcattaccatttggatcaatgtaatccttcatattaagcacctcatattttatttagattttttatgataaaaaaagagagaggttatcctctctctgattaatcttgtttatcaaccttaggagtgattgctgcaaaagcatcttccttaataggtaagaaaccaagtctcatagttgccttaattgcaatcatatcgttttctgcaagtgaaagaggtttaccatcgcccattacatgaccttgtagtgtagcttccttcaggatttcatatttcaatccttctcgaataccaaccaatgagtaatcaaagttacctaagattaaatcagcctttgttttgtcaaatccaccatttgaagaaaactcaacagggaatccgtacaattcattttgtgatacaccaggaacataaatttgatttccgtttgtgtctcttagagtacgtagagtatttttaatacctcgatgccctgcaaatccagttacatctaatcctgcatcttcaacaagagccatagcatttgaaacgtcaatatcaaatgtgccgccggttccgtttgcaataagatttccagaagcctcagcagagccaaacaagcttttcttgaacggagagttgataccaaaaagacccgctccatcaatagtagtgtaaaatgctttttcaatttctgttcgcagttctgagaaaacgttgatagtggtgtcatttaatttctctttagttactggaatgattacaccgatctttttagcttcaagttcaggatggatatatctcacttcggatgtattaatccgttcagattctcctacccagtatgctccaggcccatcaaccaaaacaggaattttctttttatctgattccataggctgaaccttagataatttgagtaatgttgaacccttggtaatgcctttgatgatttctttttgaatttgtgtaggtacaaaaccttctaattgatcttttaaaaatgccatttataatttccacctttattctttattttattatttctaatagttttatagtcttgattgattctcataaatagctgccataaagtctgaagaggatccagctttgttgttatttacagaagcaggaggagtatagctgctattcttcaatcggtcttcaacctgttcttgaatatacggcttcatagactcttcaaattttgttaagtttcctagagttacctcttcattatcagaaacaagcaaatcaattaagtctgcaggaatctttttatctgatgctgtttttagtgcaatggatttcattttctcaattcttgcattgcgttcaaattcttcatttttgagttcaagttcccgaattcttttttgttcaggagtttcatctggataccgcttcttaatttcctcttcaagcttctgaggaaatgtgctttccatccatgagtttaaacttgtggagaagaatctatctttttgcgactgcatccactttttagcatcttcatctgtttcaacgaactgtttaacaccatcaagtgttacaggctgcaacccttgaagatattgttttacctcgtcattatcttgttgttcttcaaaaaactttttaacatcttctaaattcatttcaaatcactccattcgccctttctagtgtcagtgaccctaaaaagtgcatatttttacataagaaaaaggctctatttatagagagcctgtagtattgcttatctctaatgatttaagttttctttggtgctcaatctcttgttctcttgcatattcttgttcctgtcttctcttctgcatctctacagcaggattttcaacatacggtatttgggctagtatcgtttcccatgaacatacttcagataatttgcttaatgaatcagctaaagcagtaatatcagaagggatgttcattgttaatttaagcttaaccttgcgatgatcgtattcctcgcctttttggatcttgataaacttaaagaagttctttaacctcttcttaattgctgtttccagcatcgcttgtttaagggaacatttattttccaaggagattaatcttgatctgagggctgcagaagataaattagattgaagcttttcatttgtgtctacatgactggccaacttgtacattttctcttcaagctctttcagcaaattttggacaaatttatcatcaatcttcttaataagataatcaacacttgcttgtgtaggcacttgaagaatacccgttttcttaaactttgctgcgtcttcatcagtgatttttgctccggttattttcaagaaagcctgtctgaaatcagatacctcattcaccaaatcagataaagtgttattataggcatcattttctgatttgatatcatctaacatacttgttctttcgtgatttgcggaggtcacttcaattggaggtgtatcgaagatatgtgtacgctgccccacataaattagattatcgctcccatcaacatcaaagtgtaagattgaattacttatgtaaacatctactttttcgttatcagaaaacaaatcatttttgtatatatgcaatgctaaaataacgtctttctcaacatcgccttcttcgattacaaagcagttcattggcgttaatacagcacacttaaattcattgtctctggttgtgtattggatttcatatgcttcgccaaatttagttgcttctagcataagtttttgatcgtgaattttagaccaatgagagaagttataatcaatcacatcaatcaattgattatttccatctaaactaatataggtcactggattccctaatgcatacgcaatttcgtcatgaataaattttttaaagaaattcacgactactttcatattacttctactctcattcatagcgtagttcctcattatgctatgatgtccattgtagtattcttcgtatgttttataagtctcctggttttctctaagctttctaagacacttcattaacaaagtttctaattcaggagttatttgaatttgtccatttctttttcgctttaaaactgtatcaacgatgtttctcaattactcacctcctttaaaataatgctgacctatctaaaaagttaatgtattgcacttcttgtagctcatcaataagcctgtcaaactcagctgtaatatcaggagcatcatcaaaacgtgtaaacttttcaccttcataggccattatttgatcagtaaactctttatcttcttgaggaaatacaataaaaccactgtctacctttccaccaatggctctaatcttagcttctttgtttttcgtttgatgttcattaatgatttgaatgtctcttgctgttagtgtacgatctttattaatttctctttgaatatcacgtacatctgcaccgctaaacacgttcttctcaatccataaatgcgtgatatctgggtattctttcaataaggatatcacctttgcaatatagtcatcgtattcaagtctctcaatacacgctttcctaacccatctaaagttattaggagtcttagaaccgacaataaaagcagaataatcgtgactatcctgtacctcaacggctggatcacaacaaagtattgtttttatgaaattgtctttttccttttcaatttcttttctaggtaatgtcttgatatcatggaaagctttctgccctagcttagacgcatcattcatcatttcttgtttaaatgctgaaggattgggataatacttcccaacagcaagatcatagcaatcatacttatcttcccaaagaactgggaatttcatttcttctttatgctctaagtagaactttttagcatcctcttctgcattgggattggttgcgtcatatcgaattttcttcaattcagcccatttgccactattgaataattcatcaatatcgtcaacaaggacggctttcttcacgatccgtttatactggctatcttttaatattcttgagataagacagtctctatgcagaattgtaccgagcataataaactttgttgccatcttgaccttcttgccatccctgtaaacaggatcatctccagcatattcagcatcttgtgtccatgtattgtatttcttatctcttgcttcttgagtaataacatcagctgccgattgatagtcatcgccaataatgcatgtagggcgcactccattgtgtttcaatccacgaatagatgtcccagaacttatagcttggattttacaaccgtttgagaaatacattttcaacttaattgaacgtgtgagcatatgtccaaatgtattgattatgtaggggttctcaacaaatgcctttcgagtatcattgataaattcaaccgcatcatcctctttcttcccagctacaagcgtaaagtaggatataccgtatgctgctaaatatgttgataaggcaaagttaacagttgttgtcttagagctaccacgaggcatacaaagggaaagcttatcgaattcatctttaatgaacatatcatcaagcgtattccatatttcaaaatggaaatcaccgagtttacgagctgtattagtgggttttgcttggaaagtatcctggaggtaatatagacaaaagaattcaaaacttcgagccccaagtgaatgagctactccatttttaccgaagagattcttccccttcatcattctgtttgtcctcattactgcttcatcatgagttgaaccatttttcaggtaatctctataaagatactctctaagcaaattcctgttttctcttgtgttgattaaatcagatatcccaatcacctccgagttttaaaattataataaaaattgtttgggttgctatcggatgagagggtgttcaatcatttagaatgccccctattattgataactagcgtcctttctggtgcgtttcaaacacatttagcctataggtatcagattacgcatcaatgcttatttagcctgtaaatgccttttagagaggattctatcgggtggttttatactcacaaaatgacttacttataccataaccatagtttgtaaaggcatacgtttataaacgctgtctatctcagcaacatcacgtttaaaaaggtgttattttatttttataaacgtttataaaatgtaatagacctttacaaacaaaaatggtataataaaggtacaataaatgagaggatgacaagcgatgatttctaaaatgtttggttacataagagtaagttcaaaggatcaaaacgaaaacaggcagatcaccaatatgcttaaagaaggcattactgaacgtgatctattcattgacaagcaaagtggtaaagacttcgaaagacctgcatataaaacactcaagcaagttgtaagaacaggtgatactgttgtgtttgattcaatcactcgtatgggtcgtaacatgaaagagactcaaaaagaatacgattggttcattgataatggcattaagcttaaattcattaaagaaccaatgatcaactcaactgaagatcaagacgatattcttaaagaagctatacagaagattgtattgactatccttacagcctttgcagagaaggaaagggaggacataagagagagacaagcagaagggatcaaagatgccaaagaaaaaggaaagcacttaggacgacctaaaaaggggtttgacacattaacaaaagagcaacgatccacccttgaatcaggctactctaaatggaaaagcaaagagattacaggtgttcaattcgctaaagacttacagcttactaagaatactttctataaagtgataaaagaatatgaagcacagctgaccctagccaattaataaaagctaagggtctttttattcgtcttcagatagctttgaagccgtccactcttcttcttccttagccaatacatcttttgatacattgtcattgcttcgatcatctttgatatttaaaatattctctggattaccctcagtgtatgcaagtaatagctgtgtagccttcacccttgcattatcgtttgtggatgattcgctgatcttttttaaattttcaaagaaggcttttgtatctcgacttacttcacgtctaactgaaagttttttgtaatgtaaaagtctgtcgtactcctgcgagtattcttcttccttttcccagttgtacagagtcggtctggtcactcctacttccttagcaatctcagtcctattcagctttccttccactaataattcaattgcttttaactttctttcatcaagcataataaattttacacctactttattttttacatttttcttgtgataagaacgctttaagatcgcacttacatttagcatatacaaccccagattctatttcgtgtaatccttcaggttccccacagcttttacagcaagccaattcattttctacaaaggcgttcttgtatacttctaatgctttgtctttaaaatacctttcaaatgtagccagtttagtctcataatccttaaaactgatcttttctgaatcaatcagcttattttgcctaatgacatcgacagtttctctggattccggatgaagcaagtgaagtgcaattttaacgccataatacactttttcaccttcatctgaattctccatatacacattgtaatcacaaacctcaagatacatgtccacatctaaagttgttttaattcgacctatttttttagctgtactcattttcaaattcctccgttgtatgttgttttatttatttgtctcgcttcataacacaaataaaaaagcacccgttgctgcggatgctttaccttttccttttataactttcaatatcttctcttaaaaataaacggtcacgacttgttgttttaatgggtactaatttttcacgatcgaccaactgttttaagttttgacgactacagccaattatctcaatcgcttcagacgtagttaaaatttcttttgcaataaaatcttttaaatcgtccatgctgtcaaaaacaatcttagtcatttcgaaggttcctccatttaaggaaaatgtttatgatagtaactaccaaccagattaacgctaataccattgttagtatatctaaggtgctgagatgagcataatcaaaattcgaaaacagcataataaacagaataaaaaagaatattgttgtgacatcaaccaattttttcatgtgttttgagtatggaatgaaaagtgttataataataagagaaggggaataaatcccctctagcttatgagcgacgtttcttcttggcgggagaacgtcgttttttgtttttgcttgccttcaagtccttgatgttcttgatcatggttgttattcctgctaggattgcaaccacccaagccaagtcccgaaggataagctctaacttttccatactcatttcccctcctttcttaacttaattataacacttacgtttactatcgtcaatctatttattttatttttatccttatttttcacttttttctagcatgaaaggagggtgctaataaatcccacatggtgttttctgtccttgttttagacatttatagtcgctcgcgaatcgactttgtttaaatctgaatggttatttttcttctagttcagctactgtattaataatcatctgttcaaactcttcagacttagcagatcctaatttttcaaaattggatcgaagtctattagctatgatgtttattttttcaagtgattctataggaaactcattaaagattggataaaggagatcagtgttcattaactcgtaataaaactcaaactgtttcttagtatcatcaggaatatccaagtcactgaactccttcacgacattaaaacttaaccaatcattcatgctgatcttactcaaatcaataccttgctcttcagcttctaatagggctttcacaaaattctcaaacatcttttgtagcttgaacataccaaactgaggataaatgtatacatgatactcatcattgatctgaaccttttgtttcttatcaacactttttgatagtgtctttacacctgatacgcttaattttttcgatgtcatttaatttctcctttgctttcattattttcgtaaggcttccctacaatttcttcgtactgttcgggggtaatccagtctatttcaacatacgtccttatatcagcgtccgtataacacttccagtcatagaactgcttaatatctgcaaattcggggtatgaagccatttacttaccttccttcaagtcagtaatatctttttgtagttgtgcgattaatagagctgtatcagcttctcgttgtcttcgttgagcattttccttttcagcagcagccacttgtaacgataatttagcattctgcattttcaaaagatcaaccggtgaagatacccgcccattttcaatttgtttttctagttcctctttttcttcttgcgttgcggcctctgtccatgacatatctgatggatgatacatcgcctttatgaaagaaggcggctgaacgtctgtgcaattttcaggaataataaaattccctttgccgtcaggctcaataataacgggtttggttagaatgaaattttcatcatactcataaacctgaatcatgttgtgtctcctttttgaaagcccacgactacgtccagatagtagcctccgcccatcttgtttgagtcagctgggtctgggtattttattttcaaatcaccattatcgtaaattatcagattagctgttccacctgttccgctgagtggtactgattttactgctccaccaaatggtactaattctgcaggtattgagccgaacacaatctctggttcagttctaacatgacctcttaaaactaacaacgctccccattttgcgtaaatgggcgttcgtgtacctactgtagctccattttttagcatgatgttggcatatgtaatagcaccgttccatgtcttccgttcagctaccgagacgtgtcgttcttggttttcattatgatctttgaactgctgggtcatatcattccagtaaccttggtcttcagccgtaacatgaacattagtgtcattcagatgattatcaaagtcacttttagtagcttgttttacattgtctacattcccaagcccaacctgttcagcagtaaccttatgtgggtttgattgatcgtcagtatgttcagctaataaagactttgtcctttcatcggagctgttccaataactgcgctcatcctttgtgatatgtcgatccaggtctgcatcgtgagcgtcaaaatccaccttcgatgcctgttgaatattatcaaccttagacaaaccaacttggcttttagtaactgcatgaggatttttcttatcgtcaagatgtccactaaaagcaacttttgtggcttgctcttcattgattacatttgataatccgacctgttcttttgtgacatgatggggattctcagtgttcagaatatgcatttttaaatcgaaattctgcttttccatgaactcatcaactttgtcattcaagcgtttttcatgatttgacatatgagcttcagttctgaaaaattgatctttaagattattgttttgtttaagttgacctataaattgtgaattagacattgattatttctcctaaataaagaagaccttattaaaggtcttccgtccaaatatcgtcccaaatgtctttccaggctggagaattatcagaagctgctgaaagtgattcatatggatgctcttcgtcaaaatcctcttcaaagagcttttcaaaatcactcaggcttatgtaataattgtcctcctctgaaagcagtaaatacgcatcttcaataccatcaaccgttttaaactttccgcatacatcatgaaaattcattattccatcccccaaacaatcattttaaaaccagtaatatcaacagttccagatgccttaactgtcaatagtacttttggacaaacgaagggcaactgtttttggattggatagtttgaaacaaatgcagcattactgattaaagttgcgctgtcacttgctgatgttgatgaataaaaaggaatgctcttcggtactgaataagcactaactgtaactttgctatttgcgctgtcagtctgtgttgtatacagagcaacgccataagctctaaacactcctaaattctcaacaagatctaatgtgtacgactttgttgcaccaactgccacagtatcattatctgttaacacagattcctcgtatgacttttggatctgagttttaataggaactgtgtttctcacaagaactggaatagatgatttgtttgcaacattaacatcaagaggctgatcagttttaagatcaacctctaatggaatagttgaatgttcaattgatacaggcgttattgggttgccagtaccatcatcttttgcagaggtaagcgtagttccatctttatttaagaaaggaatcttcaacgcctcccttatgcacttgcgccgccaagatcaacgctttgctttggagactcagtaggtttctcaccttttgatccatctgctttacgtttaacccgaatgaaacgcccaagagaattatcaactgcaagcgctgtgaatttgatttcaggtgtaattgcgttgccggcttcaaagtttagctctgcttcaccagaaggagatattttatcgaactgaatataaagatcactatggattgtttcagtttctggatcgtactctaaagtgtgatattccatctcataagcttcagagaatgtatcagccttaatttcaacaatttcgccttcagcatcaattttatatcgtgctttaactttcacaccctcttttgcaaaagttgtagggagttgaccttctgtggattcagtttccataagataagactctccttcgctattctcgaaagaaactgcatcaactggagtcttgctaagagttacttttccatctgactcaacagtaagcgtctcatcctcccatacttgcaccgttccattttcaaccttgactccttgctgcatggccaaccaatccaaactgaagaaagcatttttgattgttcctgtaatattcttgtcggacttaatttgataaaggttttggtttccccatccgccttttaaatagtcttcctggatactttgagacaggctagttgtttgtgcttcagcagttgcaataactttcccgtcagattttcttttcataacaacgttacatacatcatgaattactgtctttttactcatttattaaaattccaccttgttttttaatttgagaataatttctctagatttcttgcttctttcttagttatgtaatttttctcttcttcaaataaatctatatgttgactccaagagccaatgtttttagcagcttccggacttacagtagagagtacaatcgcagcagagctatttaaaaaagcagcgcctctgaaaaaatgagagtgaagttggggaagcgttaattcaagaacttcagcggatgaatacccagtaaattgaacaacacaactaacaatatcggagaaatcataattgttctcagactgtttcaacgctctacttttcttgttgaatttttcaagttcagagtttttgctaacctttttttcttttaaacaatgcatatcaagaattaacttgcggatatcgtgaaagttcttctcgtctacagcttggaatgcatcagggttattaaacaccttcgcaaacactctttggtaagaggctcttaactgatccatcacattaactatgtccaacaaagttgaagcgttaaaatcattgatcaagctatccaattgaccaaatttattgttttcttgaaattcagctattatttcagattttgatttaaccatttgagagagatcatttacgaactgaggataatctttaagtctaatgaagtggcactctcctatatctgttgaaataggagtacctaaaataaagaagtcctttgaatattccattattgtggagctccaaaggaaaagataagtttatagccgaggtatccatcagggggattagctatcaatattctattgatattagcaaccttacccacaccagcaacatttttatcgtaaacaatatcaattagccggtctatgatcttgagacttctaggatcattgtcttcaaaatgatcaatatgggtgtatacgtcaatcattacatcctgggaagtaatacgcttattgtgtgtagtataaccgttaccaaagtacatgcagatccgacattgaggatcatcttcttttaaatcgtttgatttaggagctctaacaataatccctttgaggatgtcatcaaaatcatctcttcgctgcacgtctatattagcaggattactcaactctttataataagcaagattcattaactcactgtctcttgaaacgcgcttgaaaatgcctattaagtcatttgctaatttgctcatatcatcacctccttcctaaattgtttaattaaaatctataaagaggcttaccattggccatctcttttattttttcatttgcttttcttaatacttctggatcaatatttttaaccaactcttgaaacttctcatttggctcgccccatcttggctgttcttttttattttccattaccgagcaccttctctaacatcaaaatcgctttactagctctataccatccttcgccttgacagtagcattccatatcccatgtattctcaaaaaacaaatcgcatttcttacagtagtatcctgacttgaggatcttcgtatcagtaaccttattttctttcattttattattcctccaattgttttttctcatttaaacacgattacgggggcactgaggatgccccgcacatagtcatgttaaaaggagaaaccccgaaccaaaaatggctcggaataagaacaaaaataaaatcaaaggagtcaatctaatgaaaccccgaaaccatttatttaacgtcgctggagtcggtctgtacatctcttcagcactgtttccgcaatgctgtttaatgtagtaacgacaaagaattagatcactttgattactctgcgctttccgttttcatactcaggcttagagtagacaaagtctttcattctttgaataagctcaggtgacatatctgaatcataattcaaaaaggagctgatttttgactgagcacaaccgcattctttcgcaatttccgtttgagttaaccttcttttacgaatatctagccatagcttatgtctatcaatttccacttatagtcctccttccatcaataaatttttatttgaaataattatctaaaataaggggggctgatcactatgatcagcattctttgattatttaggaggaataaccaaaagactatagatgtccaaagttgaattaaacaatgtttgggtcgaaattgcatagtatggatttttgtgataaattataataacggaatcgtataaataattatccataaatcaatacttcttttttcttccctagaagaagattatagatatcactatacaactggaaaaacccttgtatatcaagggcttttccatcttcatttattttcttataatttaagcgtgacattttttatttttacgttcttttcgttttctcagcttatctaactctcttttcctctccttttgacacttatcacacctagttcccttttcgatttcccgctcacaatcaacacatttaatagctctgcgaatgttcttttttaaattccttacaatgttatacccaaaacaattgtagagagtatccttatgcttagagcatttagtcttgaatagatattcaaccaatatatctgttatgtaactgctgtctctaatactcagcaaggtttctctgatctcttttgttacatgccattctgcttcttgacgagaaacattttgttttttctgttgtttggccttccagtgcttattacgatcaagcatagtatagactgtcacaatcattgtatcttcaaccttttttttgctataatctttgagtaattcatcttttatttgcaggcaaattccctttgtacctaattccttttgctgttttgaatacaacttgtagagttcattaaatcgtgtcgatacctcttgatcaagctcaagattagtattcttattcttcagttttgtgtaatcaaatttacccgccagcctcttaaagttcaccctgttattcggtattttttcacccaaccgattaactacagaatcatttcttgatctgacgttctttcttttcttgtcttttgcgtaaataaagaagtgaggaactttcctgttataagtccctttcaggaaaccattaattctttgactaacatgttcaggacgggttggtttgtacaaggtctttgcataatcaatctcaaagttattttccatggtaagccatttgatcacgtctaaatcaaccttatcactattccacaccttggttatgttattgctatactcaccaatgtttacctcaaacgccagttccaagcttttatagatgatctcattattgatttcttggttttctgctgtcttcatttcataataaagaggaacaatatcatcatttttcatatttctttctgctatctcaacaaaagtgctgttgctaactaaaagtgctttatctccgtccacatcaaactgcagaagtcttgacaaggcatctttagtggacgtatacacgcctttcgtaatgaaccagtctttaagatcatcatttaacttgttgatcctaatgccatgctccctagacagatgaggaggccttaacacatctaatttttgctgattattaaaaagcttacagctaacctctccgtcatttagtaaaaccttcggatcagaatcaccgcaaaaccaataaccgcaagcagcatacaaatctggaataataaaagtataatgagagccttctagcaggatttttcctgcttttgcttccttcaccaaacgctttttattcttcttaataatctcctttgaatggttatcatttagcaactcaggataaatcaaatgggctttctgaaagttatttttatgggcattgctttcaacggctcctataacctcaagcattgattctttatctttgtaaagagtttggatcctcttcactgtgttttctgaaagcttttctaattcttcatctgtcgtgtcggttagtgtctggatcatttgataattaagttcactgtttttaaattcatcctcttcttcattcaacttggctgcctgacactcatacttcttaaatttggatttgtaatcatcccatgaatcataatgtttccagagcttaaactgactcttcgttaggataattttaataccgtctttaacaatatcccattccttgccgtatatatctttaattttggtcttccggcataatttagaatactcatcaaatggaaatgggactaacatccctttcataaaaggggctctaaacatgaatgcactctccgaaagctcagggagaatcattccacagccatccgtatgatttattggaatagacttgtactctcttttaatttcgtatgtttcatcgtttatgtaatcaacctcagtggacacatccgtctcaaaatcatttacaactatacactcatcaatattaaacccttcccataatgtactggcgctatttgataaggcaaggtaagcgatccatttgttaatgctcatgccgcccttagaattaattacctcttcactaagcccacacatcagagtgtttttcttcttcaggtacgtcttttctttgatgaatacacccttcttttgtctaatttgtcctgctgatgaagcatagtaaacgtatttttcattattaaaataatatccattctgaaccaagcttctaaaaacgttatggtaaaaggattcaactatcataatctcctcagtgatctgatcgtagtccaatccaagtgttcttattagcactgaatcaaataaagaaataaccctttgtgatctaacctctccatcttttgttttaagcgaatcacctctaagggttctcgtccctttaaaactttgctgctcttcaattaattcatctttcttttcgttaatccaacagttagtaatttttttaagacggttgattttcgctttgttgtatttgcaggccattagctcatcaatatcattcgaaagcctggactcactttcacctttttccttgatgtatgtaattagcgattgttccaattccttaaagcttctttcttcctcaaagagcttgccagttatatctaaatgattatcggttacatttgaatcattcattttcgccactttttttgccaacttctgcaagaactttttataaaggcgaagttgaagcaaatcctgatttaatttttcttctttatcattataaaaagcagatgaatctaaagagtaaacgaatactgatttagttaaattttcatttttcaataagtaatcctccaattgtttattccgaagaatgattaacttgttaatcatgatgagaagatggacaaagattactttgtacatctaggctcttcttaatttcaaatgatcaaatagtacttgggggatgctttaggttaataatccctcgctacgctccaaattattaaccttacagccaaccatcccccaaacccccttcagactggtgtttcacactcttttttctatgtaaaacttaaactcaaaaatttgacggtttaatgttcctattgtgtttcttgtttatactataggaagtttaaaccgttactttttatagaccacttggcaaagactgcgctatatcataggatagatcatcttgggcttccatctgttcaatttcatagcttatactctcagcgtcctcattaataaggaggtcaattagctttttgaagtcacgaatgtaattttcactgattctataattgttttctctaaatattgaatacgactttttgtgtctaccttccgcatttttcaataactttgaacaagctgtatgattcagtttctccttatagtcaacccgctcaatttctttcaacagaaaaccaatgagctcctcacactcattttcaatgtatttatcatttgcggtgatgtcataagcagcaaagtaatatttgagattgctacattcttttaatagagtctccgatctccgtttaaattcattccagtgccttgatactcgcacatgacttaattctttataaccaagctcatcaagcacttttttctcgcatgccataatcattttcttctcggccgaggacgctttccgcggtctgaatttccccttttcacaaacctttgtaataacgtcatacatgattagccttttctcaactaacttgtttagggcttgtacaaccgctttcttgaagctattgttgctactatcgtaaaaatctttcacaatttctgtatcagtgtttgcatatctagctagagactttcttttttcaaaacaatacttataattttgattaaccaagcttactgattttattaatcgtcctttacttatagatatgtttccattcttgctttgggcgagcatatccaatataaggagctgtagtagctcactgtaaacagtgttattcccctgccgttttattttttgaagaggctgctcaaagacttcctctataattatggaatgaccaactttactatatgtacagtatcgctctaattctttaaactgcgcctttcgactatcccctgaacgttttacttctagtccaagttcaccgcaaagcactttataattcttgaacgtttttcctgatgttaaaacctcaatttttataagcattctctcctttaaattaaatttaagtattctgatggtttactgttctcaatagctgtaacaatcggcgctctgttttcatttgtttcaagtttgcaccacagttgctctccattctccacatacctaccgttaaatttcgatatttcagcgtaagcttccggacaatatgaagaagatagcttgattaaaccggtgtcaaaacactctgtaaccgtcatttgatgaaaaccgttagttgagaatttatctaggttctcaagcataatccttatgtcattttttaaattttccgatgattttctatatgtaactttcttacaaaccccgtcacgcattatgtaaggcaaccccacaactactgaatcatatggctgcgggctaataatttctgctgtgtaaccatttgtgctaagtattgcattatgttttaggctataataaaccggcttgtcttcattgattcgcttaaagccattagctaatgctgctaaatcaattcttacgcttcttctagccgacatttaatcctccacttattttatttttatcctaaaaatatgtaatgagaaggagtgaacgattcgttcaccccttcaaatggatatgtaatgcttacgcaccacgtccaaaacctgctacatggaatgtttcttcccctgatgcgctgtgaattgtagtttgttgacccgcaacgaaaccaacagccaatgaagctacgattgtaagaccgataaatacttttttcatattatgttcacctcctttcaagtgatgcgaaattgatttcgcatttaaagggcaagtaaatccaaaatctgctcgtcctcacccatttcccttaatttatccaaaggtaagcgtatgctgtatagatcgccggatagcttaaagtgttttatagactcataaaagaatctcttatcttcataagctagtccctttagataaaaatgaatgccaaagtcattatgaatattcggttgctcctctaagttctccaatatttctttagcctgttgcaagttgtttttcttgatgtgatagtgtgcaatttcttggatatctgtaacttcatttgaatcagggtttagccaaaagttctcttgattccaatggttttccaagaaacaaaggcttctagttagctgtaatttcgccaaggggttattctcagtatgttttaaaccggccaggtaatattcctttgctttttcataatcatcaagcaaataagtattccccaaagttagatagctataagcgacaagcctatcaatattcgtcacattaatgccatatgagcaataaaaacgggcttgagtcatattattctgactgaatgccgaagcgcccaacaaagccatcagacggttataaaaggagcttttaatctgttcattgttttcaataaaatcaagatcaacaactgtcgacatttctgcaagatttgagtattcagccattctaaggtagtaatacaacgggattatgtaagtgaacacacgcatttcttgagacttgggatcaagcttcccaattgctttaagcgcctgatgtgcgtttatttcgcctctgtcttgcttacgtttgatctgatacattgctgcccattcacgttcaatcgaacagctactgttgattaattgatcaattaatgcgtcagtttgttcatactgttcattaatatctgacatttcaagacgtaccttttcatctacttttgatttcttagcttctctctcttttgctatcatccgaataaccccctgtggtgtgtcactaattcagaacaacagacagtggcgatgtcaccactaacccgaatctgaatataggatctcttttagttcatacagaacatatgatctcattatagttcatcctccagttttatggaacaagttatgtattgcgattatgtgttgcggtgttgctgttatgtaatatgaaactattagacttactgaccgttgaaccaacgcataaatccgttcgttggaattttgatacgtctaccgatctttactgtgtggaactttccacttttgcacagggcatatgcttgatcacgcccaatgcccagccagttctgcacatcttcaacgtcaagtgccggtttattcatgatgtcctcgtacatctggttcctcctttctaattcgggataatcccctcttgtttgggattaatttaagtatactcacattcaattaattagtcaataataaattattaattatctaataagttttgtaactgtttttaatcataattaattatgttatcattagctatattgttttatgatcttggaggtataagaaatgactgagaatgaacggattggaagaataataagaaacttcagattaagagagaaaatgtcctcagcagactttgctctattggttggggttagtcaagggactgtatccaacattgaaaatgggaagtttgggcaaagaaaaaacagtttgcaaacagtgaaaagaataattgagatatgcgaaattgatcttcctcctgacattgctgattttttagatattgaacctgaaccgacgaatgaaaatgatgatactgaaaaaattttggttgctagcagagacatgtgggatgtaactagttctacttcagtcgccattcaacttagaacatttgttaatggaaaagacttagatgacggatcagaaaaagaacgggattcccgtgaaaaatcttacatctatgaaagtgatgtcgtcgttaacactctaatggaatttatagaagagaataaaaaggaaatcagaaaaaaggttttggaaaatttaagagaaaaaagtttaagatttctcaagcaatacaaagacattgaggaggacgattaatggcatctattcacccttacaagacaagtaaagggaagcagaaatatcttgtagcctatgacatatatgatgagaatgggcagcgccaccagaaaaagaaaagaggattcgataagaaaaaagatgctaaagaattcattactgaagttgaatcagctattaataaagggatgtatattcagactccaaagataacggttaaagattatttagatagatggctcgaagtaaagtcgataaatatcggctctcagactgcaacactttataaaaattgtttaaagaactacatttacccctatttaggggatattcttttggccaatcttaaaacagagcacattaataattttattcatgctcttcacacaaaagatagaggcaaaggaaagattggatatgcttacaaaaccattaagagaagccatgaaattgtcagcacagcacttgactacggtgtagacaataagatgatcaaaaccaatgtagctaaaaaagcaatacttcctaaagaacccaaacgtaagagaatagatgtttgggacttagaacaagccaatcaattcttagaaacatctaaagaggatgaacaaaacagatatcacttggcttatgctatagctattatctgtggaatgcgtcagggagaaatactggggcttacctggaaagatgtcgacctagaagacaaccttctttatgttgaacaaacattgtcccatgatggtaaagaaattcttgatgatactaagactaagaaaagtagacgaacaattgaattcagtgaatcattggcagatcaattcagacaacaaaaaaagatcattgagagcgaaaaagaaaagttcggggacgattaccaagatcaagacttagtaatatgcacagagcttggtaatccaataaacgcacgaaacgttcttaggaagcaagctaagctgatgaagaaggctggagtaccaaagataacctttcatgatctaagacacgtacacgcctccttaatgctttattttggacacgatattaaagagatatccgaaagacttggacatgcaaaatcgagctttacttatgatacctatgtacacatcatgtctaaaactaagaaaaaacttatagataacctgcagcgatcaataaaactgtgacctcctatgatgggggttatttttttcgttttcttttcttaaaatgagacaccctgttgccacttttaaaactcaaacacaaatgttgccgttttgttgccaatagagattagagcaaataaaaagccactcttgaaattctcaagaatggctttagatcaagctttattagtatggagccaagggggctcgaacccctgacctctacgctgccagcgtagcgctctcccagctgagctatggccccgtgctgtaacgtcatgttttattatagacgagtcttctttgaatttcaagcagaaaattcagtttgctcatattttcctgagacgcttttcgaatataaaaagaagaccctccggggggcctcttcgtttatcgcacgagcatgattaaaatgatgccgaggatgacacggtaaatggcgaacgggacaagcttaattcggttaatgagccgaagaaaaaacttgacgactaagagggcgacgacaaaggcgcagataaagccgacaagaaaaaacggaatcatgtcataagaaaggctgctccagtatttcaccagcttcagaaggcttgcgcccgccatgatcggaatggccataataaatgtgaagtctgcggctgcccggtgattcaagccgacaatgacacctccggcaatcgttgagcctgagcgggaaaatccgggccataaggcgagacactggaataatccgacacagaaagcctgtttgtaggtgattctgtctaccgtatcgatcgtttctttccttttattgatccagtccgctataagcataagcacggctccggcaattaatccgtaagcgaccgttctgacggagaataaatagcggtcaatgaaatcctcaaataaaaagccgagcaccgccgccggaacaagaccgacggcgatttgcgcgatggtcagcctgtatcccttctgctgatcgcgcgcgacgttttttttgaggccgagtaaatgtaatatccgatctttaaacacaatggctaccgccagaatcgaaccgagctgaatcaccactttgaaggaattggcggcttccggattcatcaggcttccggatttcagccagatgtcatccgctatgatcatatgtcccgtggaagaaaccggcgcgtactccgtcagcccttccacgattcccaaaacggctgctgtgaacatctcccatagtgtcatcccattcttcccttcattcatcatttacaaaagagaagctctcctctgaaggaaagcctgtcttataataaatatcatgtccgttccgattttatgacttcgatacagcatcatttttttcttcttcatataaatgcgaacgcattttgaaccaatcaaacagatgggtcgtgaccactttgatgaccgcataccccgggatggctaaaataatgccgacaaccccgaacagctttccggcggttaaaagaacaaagatgatggtaatcgggtgaatgtgaagatttttccccatgatctgcggcgaaattaatttcccttccacgagctggacaacggtccatacaatcgcaagcttcagcagcataaggggcgaagtgaccaacgcgataataatcgccggcgtgatggcaatggtcggccctaaatacggaacaacgctcgtacaagcggcaatgaccgcaagcagtgacgcataatcaagtccgataatcagatagccgataaataataaaaacccgatgcagaagctgacgatgacctgtcctctgatataggaacttaatctgtggttcatttcactaagcatcgtatacgtttgttctttcagacgggtgggcacaaactttaagatataaatcggcagttttttgccgtctttcagcaaatagaacagaataaacggcacggtcacaattgaaataatcacttccgtcagcgcgccgataaaattcccgactccggtaaatgtgctgtttgcaattgtcgccgcctgcgccgatactttattagcaagatcggaaatgttgatattcatcgtcttttgcgcctgatttacaaaatcgcttccgatcaggcttttcgtctgatcttcaacgatgtccacatatttcggcagattgtcgatcaggctcatgatctgttcctttaaaaacggaataattgaaacgaccgtaatcgtaatcagccctataataatgaggtaaaggagcaggatggaatagactcttttcactcttattttttccaatatatctacgatcggattaagcagataataaacaattcctgtcaaaatgacggggagcgcaatcgttttgagcaggacgataataggtgtgaaaataaatgatgtcttcataaagacaaggatattgagaccgatgagcagcaatacaagcaaaaacaagacaaatttattgtctaagaaaaactgtttaaatctgccgccccatgtttgcaatgtttccactattgttcctccatcatatgtattttacttaaattgtacactatcgttcctgtaatgaaaaataataaccggtctctatgggaatttttcctatccctttagccggcagccttttttccatttatgtttctcagaaaaaaagctataatgtaagccaatacatagaaggagcgatagcaatgattcgatttgcaacagtcggaacgaattggattacagaacgatttctggaggcggcttctgctattgatgattttcaattaacggcggtttattccagaactgaggaacgcgcggcggaattcgccggcaaacacggcgctgctcattatttcaccagcctgaaagaaatggcggaaagcaaagcttatgacgcggtgtatctcgccagcccgaatgcatttcacaaagagcaggcggtcctttttatggaacacggcaagcatgtactgtgcgaaaaaccgtttgcgtctaacgcaagggaaacggatgaaatgattcacgcagccaaaacgaacggcgttctcttgatggaagccatgaaaacaacgttcctgccgaacttcagcatgcttcaaaaccacttacataaaatcggacccgtcaggagattcacggcaagctactgccaatattcatcacgatatgatgcatataagaacggtacggtgctaaacgcgtttaagcctgaattatcgaacggttcgttaatggacatcggcgtgtactgcatttatccggcagtcgtcctgttcggcaaaccgaaaaacgtcattgcgaccggtcataaactagcatccggcgttgacggcgaaggcacggtcattctgtcatacgacggatttgaagcggtgctgatgcattcgaaaatctcaaattcgtttgccccggcggaaattcagggtgaagacggcacgatcgttctggacagcattcacggaccggaacgggcggagatccgctatcgtgacggccggacggaagacatttcagtccctgatctgaaaccgtcgatgtactacgaaacggctgaattcatcaatcttcttcgaaacggacagcgggagtcttccgaaaatacatttgaacgttctttcattacggcaagcattatggaagaagcgagaaaacaaatcggaattgtctttcccgccgatcaaaactaaaaacatccgcccggattcgggcggatgttttttatttggacgctaacaggtcagcaaacgcttttgcatactgcggaaggtcgggcgggcggcggcttgatacaatgtggccgtcagttacgacagcttcatccagccactgtgcccctgcatttgtcatgtcgtctttgatgccgggcgtgctcgttactttttttcctgcgagaattccggcagatatgagcacccagcccgcatggcagatctggccgatcggctttttctgctcgttcatcgtacggatgatgtccaaaacttcgggatatcttcgcagtttgtcaggagcccagccgccgggcacgagcacggcatcatactcctggataatcaggctcttaaaatcgtaatccgccgtcgcgggcacgccgtattttcctttgtatgaacggcccgcttcttctcctattaaatgaacgatcgcgccttcctctctcagccggtagacgggataccaaagctctaagtcttcaaaatcgtcactgacaagcgctatgacttttttgccttctaatctcatcactgccactcccttcttttatactagtgtatcgctttttttaaatgaggaaaagaaacagctcgctacagctgttcttcgtcttcagactgaatcgtaaatttccgtgtgacctgctgcagttcttcggccatatgcgcaagcgtttcggcggatgaactgatttcttccatggaggccagctgctcttcagctgaggcggcgatgtcttgaatgccggcggacccttctttggcgactgaggtaatgtcctccaccgcgtttgtcacattttgcgacccggctgcaagcttctcaagcgttccgttcatatgctgcaaggcgcctgaaatctgagtcgtcatttctgagattttcttgaagctttcggccgtttgatccgtaatatcgaggccttccttcacatcttgattcaccgcttggaatacggaaagcgatgtggcgatttctttgacgatttcctgaatcagcgtttcgatttccttcgcggagccggctgattgtacggcaagctttctcacttcttccgcaacgacggagaagccccgcccgtattcgcctgctctggccgcttcaatggcagcgtttaaggcaagcagatttgtttgatcggcaatgccgttaatgacgttgagaatgctcttaatgtcgtgcgacttcgtttccagcccttttacgaccgcttccgcctgctgtacggaacgatcaattgttttcatctggccgaccgttttcgccactaattcttctccgcttccggcggtttcagaggtttggatggcggattcagtgatttccgccgatacattcgccgtctcggcaatgcccgcattcatttgggaaaggtgatcagcactttcttccaatttctcgctttgtgattcgtttccgtttgagaattgttcaatcgccagtgtaatatgctctgtcgccttgcttgtctgtccggcggatgccgtcagctcttcggatgaagaagcgacatgttcgacggatgactggatgacgccgatgacagaccggagtgacgctgacatctcattgaagctttggctgagctgcccgaattcatttttcgacttgatgtcaatgacttccgttaaatcgccgtcactgattttagctgatgtcgaaacaagttttttgagcggttttgcaatcgagcgaatgataaaaaagattaaaaccccgccgacgataagagaaaccgccaggatgatcagcgccattttcatgacaggcgaggctgcgtcatggatctcactgacaaaaaatgtgccggcgattttccagcccgtcagtttgtttgtcgtgaaggccattttcttctgctgtccttcaaacatgtattcaaacgatccgctcgatttggaaaacacttctttcgtccactctccggagccttccgttcccgcttttatagtcggatgcgcgatgtattttttatctcccgttgtaatgaaggcaaaacctttatgaccgatctggacgcgttcggaagcgttcagcaggtcgccaagattaatatcaagcgccacaacgcctgatccgtcttttgtctgctgggcaatcgtaacaaccgtctgtccggttgcagcgtctttatagggctcggtaaacaccggctgtccgcttttttcaagtgctttggtataccactcgcgcgtgagcggattataatcggacggcatatcaacggacggatatttcacgaacgctttgtcgcgagacgcggcgtaaattgacgcgacatcgtcatttacggtgacatactgcttcattttgtcgagcagtaccgatttattttttgtgttcagtttttccttagtgattgattcgctgtagtagtcaatcgctttcagcttgccttcgagcatgttttccagcacgctgttcagttcgctgacatttccctgggcgctgtgggtcagttcgctttctaatgtactccccgccgtttggtagctgaagtaggcgagtatgccgaccggaagtaccaatacggctaaaaatgccgcgatcagcggcttgctgatggatggctgtttgatccaatgtatcagttgtttcattttttcagtctccttctttgaaaagctaaatctaatatcgtcagataggacaaaagatttattaaaaaaactaaaaaaaacacccaaacagcacatttgggtgttctatgacctattaatctattttaaatcgtttcgtcatatcacgtaattcttccgccatttgggataacgtttccgaagacgaactgatttcttccattgaagccagctgttcttcggcggaggccgcaatatcctgaatgctggcggagctttcttttgcgatggacgcgatttgctcagaagctcctgaaatctgctgagagcctgctgtcagctgttctaccgtcgcattcatattttgaatttctccggcgatctggttcgtcatttcagaaatccgtttgaagctcgtttcggtctgattcgtaatatccagtccgctctccacctctttgttgacggattggaacatgccgagagatgtattgatttcattgacgatttctataattaagctttcaatttctttcgctgaatcggcagactggacggcaagctttctcacttcttcggcaacgactgagaagccccggccgtattcacccgcacgcgcggcttcaattgccgcgttcagcgcaagaaggtttgtctgatcagcgattccgttaatgacacggagaatgtttgtaatgtcttttgattttgtttcaagtccgcgcaccacttgttcagcttctttcactgaccggtcaatgacgttcatttggccgaccgtctggtggacgagctttccgcctgaattggcgacttccgctgatgtgacggaggattcggtaatgacggcagatgctttcgccatatctttaagcccgctgttcatttggtaaatatgttccgccgcgctttcaatgttttcactttggctttcatttccgttagaaaattgttcgatcgccagtgtgatatgttcggttgccttgcttgtctgctccgctgaagccgtcagctcctctgaggaagatgcgacgttattcacggaatcctggatggcatggatgagagacctgagcgaagcggccatattgttaaagcttttgccaagctcgcctaattcatcttttgactgaatctcgatcgtttctgttaagtcgccttcactgatctgtttcgatgatgtcacaagctgcttgagcggttttgtgattgaacggataatcagcaccatcacgatggttccgatcacaatcgctaatacgagaacgagcagggacagatgaaggatcggcagggccgcttcatgaatttcgtccagatacatcgttccggtaatcttccagcctgtcagcccgtttgtatcataagccattttcttttcctggccgtcgtatttgtattgaaaatcaccttttttgctggtgaacagctgttcagcccactccccgtttaatactgtgcctgacgtgcggttcgggtgggcgaccacttttttgtctttcgtcaggataaaagcgtagcctgattttccgatgttcactttctttgtcgttttcagaagctcatcgattttcatattgatggcgacgactcctgagccgtctttcgtctgctgaacgaccgtcacgaccatcgtattggtggaagccgtgcggtaaggatctgttacaacaactttccccttattttccacggcctttttataccagtctctttcaagcggattatatcctttaggcatctgcagatccggataccgtgtgaaatgtccttccgtgtcactcgtataaatggattccacgtctttattgatcttcatgtactctgtgaatttatcggtaatttgcgattggtttttcggcttgtaccgatcctttgtgagccagtcgctgaaatatgccgttccgtcttccttttggctgatgcttgtgttgatcatatcgttaatctgctgcacattatctagtgcgcttcccatcatctgcctgtcaagcgtgcttaccgccgattgataggcgataaaagccagcgttgaaataggaagaatgagaatggccaaaaaagaaatgagcagttttcttgtaagcgatctctgcttgatgatttgcacaatttttttcatctgctatatctcctcttgcgtgtttacccttcatatcggcaattatgggtaaatatacacatccaaaaagaagaaatataacgaaacatactttttacctatcgtaaaattagtcttttagacttaattaagagtttatcttaaaacgctttgtcagttcgcgtaattcttccgccattttttccagcgtgacggcggaggaactgatctcctccatggacgcaagctgctcttcagctgaagccgcgatgtcctgaatgccggccgcgctttgtctggagacggccgcgatatcctctgaagcgtttgatacttcctgagatccggcagaaagctgttccacggttgcattcatattttgcagttcaccggcaatctgatttgttttaacggaaatgtcccggaagcttttttccgtttcgtccgttaactgaagtccgcttttcacctcgtgattgacggattccagcattccgagcgaagtatgaatttctttgacgatttcatgaattaaggattcgatttctttcgctgaatcggcggattggacggcaagctttctcacttcttcggcaacgactgaaaaaccgcgtccgtattctcccgctcttgccgcttcaatggctgcatttaaagcaaggagattcgtttgatcggcaatgccgttaatgacgcgcaaaatgctggtgatgtcctgcgatttgagttcaagcccttgtacgacttgctccgctttacttacggattggtcaatggcgcccatctggccggctgttttcttgacaagccgctcaccggcgccggatatctccgccgattcaattgacgtttccgtcaccacggctgccgcttccgccagatcactgagcccgtctttcatctcattcacttgggctgtcgctttatcaatactctcactttggtcttccgttccattagaaaactgttcaatcgcaagggtgatatgttccgttgctttgctcgtctgctcagccgaagccgtcagctcctctgaggaagaagcgacatgttcaacagagtcctgaattccctgaataagcgaacggagtgaatctgtcatatgattaaaacttttaccgagcacgcccagctcatcttgagagctgacatcaatggtttccgtcagatctccgctgctgattttttcagctgaagctacgagacgttttaacggttttgtaattgagcggatgacaaaataaatgaaaatcatccctgcggcaatggctatcgccaatatgataacggccagagtcagaaccggtcttgccgcatccttgatttcatccacggacatggttccgctgatcttccagcctgtcgcttcattggtcacgtacgccatttttttcgctttcccgttcagcgtatattcaaagtcgcctttttgcccgctgaataatgtatcaacccattttcccgataccgccgagccggctttttcatcactgtaggcaacggcttttttatttttgctgaggataaaggcgtatccttcttttccgatgttcacttcttttgtcatcttgatgagatcgtcgatttttatatcaatggcgacgacgcctgatccgtcttgcgccgcgcgggccatggtgacgaccatctttttgtttgagatggactcataagggtctgtgatgatggtttggcctttattctccatggcttcctgataccagcttctttcaagcggattgaaatcggccggcatatcggcatgcggataacgggtaaacgttccttccttgctgcttgaaaatacggcggatgctttatcattgctttcaataaactgcttgaacctttcttgcatttccgtttggtttttttctttaaatttagcgcttgtcgcccattcgctgaaatatgctgagctttttgtaaacattccgatccggtcatcaatcatattgtttaagatttgcacatttccttcggcgctttccatcatttgcttttcaacggatgaagccgccgaacggtaggcgccggcagccaatactgctaccggaatgattaagatcagtaaaaatgaaatgatcagttttttggctattgattttctgacgattttttttgctgtttttttcaattttgtaaacctctttcaatcatttactgtttatatcggccgactccctttttattacattgaaaattaagtcataaatgaaaaatagttctatgtactccctttgcatgcaagactttttatttaattatccggctgtcactataaaaaaggacgccttccctccggaaagcgtccttttttactagttgattttaaattgtttcgttaattcccgcagttcttcggccatttgcgccaaagtatcggcggatgtgctgatttcttccattgatgcaagctgttcttctgcggatgcggcaatatcctgaatgcttgctgcgctttccctagatacgtccgcaatatccgtcactgcggctgaaacgtgctgggagctgtctgacagctgttcaaccgtgccgttcatcgattgaagcttctcggcgatatcgtttgtcatgccgaagatattctggaagctttctttcgtgcggtccgtcacggcaagtcctgattgaacttcttcattaacggatgtgaacatgtgaagtgatgtattaatctcagccgtgatttcctgaatgagtttttcaatctctttggcagaaccggcggattggacggcaagcttgcgcacttcttcggctaccactgagaagccccgcccgtattcacccgctcttgccgcttcaatggctgcatttaaagcaagcaggtttgtctgatcggcaatgccgttgatgactcttaaaatatgagtgatgtcttttgatttggcctcaaggccttttacaaccgcttccgcctgctggaccgattgattgatgagattcatctgcccgacggtttgctgcacatattcttccccggtgccggcagcttccttcgattgtttagatgcttccgtaatggatgatgatgtgcgggaaacggcggcgagtccgtcatttatatgattcagcttggctgagcttgaatcgactttttcgctttgctcttcgtttccgtttgaaaactgctcaatggccattgtaatatgttccgtcgctttgcttgtctgcgaagctgaagcggtcagctcctccgatgacgcggccacattgtcgacagagttttggatcgcgctgatcagtccgcgcagagattctcccatttcattaaagctcgcgccgagttcgcccaattcatctttcgagcggatatcaatggtttcagtcaagtctccgccgctgatttgtttagaagagcggacaagccgtttcagcggtgacgtaatggatctgacaatcaacagaattaaaattcccccgatgataatggatgctgcaaggacgagcattcccatcgtcagcaccggttgtgaggcgtctttaatttcgttgagctccatgctcccttctattttccatccggtcagtttatttgtcgtaaacgccatttttttattttgatcatcgagcttgtatgaaataatgccgctgtctttgctgtatacctcattcagccacggggttgaaactttatcgcccggtttgtggtctttatgcgcgacataggttttatttttggatgtgataaacacgaatcctttttgcccgattttgattccctgcatctgcttcagcagctggtcaatcgtaatatccatggccactacgcctgttccgtcctgcatctgctttgccacggtaatgaccatgctgccgtcgcttgccgcggtgtaagggtcggtgacaacgagcgtgccgccggccttcacagcgtctttataccaagtgcgtgttctcggatcgtaatcggccggagtattctccttcggcgcctgtgcgtagctgccgtcttccgtacctccgtaaatgcgggctacgtccttatgaatagacgtgtattgcccgaacttttcttcaagagcagacatgtttttctttgagaaggatgacccttttaacgtttcactgaaaaattcaatcgcctttgcttttgcgccgatatcatttgtaatggttgtgttaaaagattcgatgttatttttcgcgttgcctgaaatctgatcatccagcgaattgctcgccgtatggtatgaactgaattctaacacgagaatcggtatgattaagatcacgataaatgaaatgattaatttacgtgaaatcgatgcctttgtgcaccaattaatgaattttttcatattaagctgctccctcaagtgtgataccttatatatcggctcagtcttcacattttgttaacatttcctccttttttatgacttgattttcattgcccaagcttcctgcatatcttataaaaaaagataggggggcgcgcagatgattatcatatccggccaagtgcttcggcctcaggacatcgcgaactggcagacggaagaaagccttgttccgtatataaatgaactgctcaattctcccgtacaattcgattacgggtcgattgctgaactgatgttcgaggtgcggctgcgccgccatattgcggaagccgcaagagaactgcacggatcaggtgtgaaatttgcaactttcgccaaaacatacggaaatacggcttattggagagtgacgccggaaggagccttggagctgaagtacagaatccccgcttcaaaagcgattcgggacattattgaaaacggggcgttttacgcatttgaatgcgctaccgccattgttgtgatttattatctggccgtcttaaagacaatcggtgaagaacggtttaaccggcgtttccgggatatcactttgtatgactggcactatgagcatctgccgatctacacggaaaccggcagccactttttacggggagattgtttatattttaaaaatcctgattttaatcctgcaaaggctcagtggcggggagagaatgtcattgtgatggggaatgatcaatatttcgcccacggtctcgggattctgaccgctgaacaaatcatccagagattgaattctttaagaaaaaaaaatgccgtgcagccggcttatctgcttaaccaggcaacaaggcttgatgcacccgcgctttatcagatcatgcattaaaacaatcccatcgtctgtcattgtgacgatgggatgcggaatgcttttcttttccggtaaaaagccgtcgtgccgagcgcttgatttgcagcccattcaaacttctctaaatcatggcgggtgacggctctgtcccgtcggctccatttaatggcgcggacaaagtaataccctttaatcggcgccatggtgactttggaatgcggaaaatcttcaaagacaaactcaatagtccctctttttttgtaggacatttgaagaatcttcatcatccatcacctcacgatttctgaattatgattcgcacaatctgtccaaaacggttttcacgtctgtcggcccttcaagtttcgcggcggactggccggcccataaagacatatactccgcgtctcctgattgagccgcgtgcccgcgcatcggctttgtcagcgtattatgcagcggataaggcagcgtatttccctcgtcagcctcatatgttttcatgaactgattcacgattccccgcgcctgttttcccgaaaacagggtggtcagccgcgtgtcggctccttttgattcggcaatggctttttgatatgccggtgaggcgctgctttcttcacaaaggagaaacggtgttcctacttgaacgccgtccgcacccaaacatcgggccgcctgcacgccgcggcggtcaaaaatgccgcctgccgcaatcaccgggatattcagcgcgtctttagcctgcggaatcagcgccataaggccgagagccggttctcctttaaccggcagaaacgacccgcgatgtccgccggcttcaattccctgaagaataacggcgtccatcccccgttcttcaaaagccttcgcttcctccggcgttgtcgccgtgccgaaaaggaaacaaccgcttttcttcagcttttccgccgtttcttccggcggaaggccgaaggtgaatgaacacgctttgactccgtaacggatcagaagctccgctttttcctcgaaatcattccattcttctttcagatcagagaacggattggcgtcttttgccctcgggatgcgggctttccatttttcaaccagttccgcctcaggcatctgcctttcttccgggacgaaaagatttacttgaaaggagcggtccgtcagctctttcatctcgataagctgtttttcaagggcttgcgggctgacgtatcctgaagcgaggcttccgagcgccccttcatttgataccgccgaagccagacgcggcgtgaccagcccgccggccatcggcgcctgaatgacgggctttgttaatgataatgcactcatccactcactcatttgtgttttcctccgattcagcctgtattttgatataacatgttctgtttcgcggaccgtcaaattcgcaaaaataaacgccctgccatgttccgagtatcaggcggccgtcttctatgatgacatgctgggaggcgccggttgtactcgctttcatatgtgccgccgtatttccctccatatgccggtccagttcgtgctcccacggatatatttcatcaaaccttctgagcatatccctcttcacatccggatcggcattttcatttatggtaatgccggcggttgtatggggacagtatatgagcgccaaaccgtttttcacgcctgttttgcggagaaacgcttcagcttcatgtgtgatgtcgatcatttcatcccgtctgtttgtttgaatctgcaattttttcagcatatagatgcctcctttctttttctcttcctttcccatattcgtttctgtatttgtcttttcctgtcggatcgcgatgataaacgcagatcacaaaaaacttcagcctcgggactgaagtttttcaccatatatatacgcgggcctcataaggctttaaaagaaaggatgtcacatgccgatgcggtggtgtttccatgcttgcgagcacgagcgtatcggagtcaagcggataacctggatgcttgtataaagcgggggtccgggacagatttgtgatgatcagggcggtttttgttccgttttttcttagataggcataaatctgccggtcattcggaagcagcaattcatatgtgccgctgatcaatacgccgtgctcttttctgagggcgagcagccgtctgtagaaatggtatacggatgtttcatcctgcatttgtgatgcagcattcagccatgtgtggttcggattcactccgagccacggagaagcatcagaaaacccgccgttcgcctcaccgctccattgcatcggtgtccgtgaattatcccggcccttcttccagatgatcttcatcactttttcatgcggaacgccgcgggacgtctctttttcatacagatatttcattgcggcgtcatcataatcttctatggatggaaacgaaacattggtcatcccgagctcctgcccctggtaaataaacggcgtgcctttcatcagcatatacatcgcggcgagtgccttggcgctttctgtcaaaaaccgttcgtcaccccataccgagacggaacggggctgatcgtggttctccataaataacgcgttccagccctttccttcaagactgttctgccagccggacaagacgcgcttaagcgccggaatggagatgctttgatcatcttccgtatcccagaggccgagatgttcaaattgaaaaatcatttgaaagacgccgtgttcctcaccggcccaatcagccgcctcccaagccgccactccgttcgcctcgccgaccgtcatgatcggatagcgcgaaaatgtttcccgtttcagctcttttaagagatccattatgccttccccattcatatggtacgggaaagacgggacgtacgggagaccgtccggattcggcatgtcagggagcccttcttttttcttaatgtgagaaatggcatccacccggaagccgtctatgcctttatcaagccaccagcggaccatctcataaacggactgcctcatcgcttcgttttcccaatttaaatcaggctgttttttgtcaaacaggtgcaggtaatactggccggtctcttgatcatattcccacgctgatccgccgaaaatgctttcccaattgttcggctctttgccgttttttccgtctctccagatgtaccagtcccgtttttcggaatctttcgccgagcgtgattcgataaaccaaggatgctcatcgcttgtatggttgatgacgaggtctataatcagcttcatgccgagcgcatggacatccgcaaggagccggtcaaaatcctccatcgtcccgaattcgcatgcaatttgtttataattccgaacatcgtagccgttgtccgcacccggcgagtcaaaaacgggacaaagccagatcacatccgcccccaactcttttatgtaatgaagctttgctctgatgccgttcatgtcgccgattccgtccccgttcgaatccataaagcttcggggataaatttgatagacggccgccgttttccaccaatccgttttcataccgacactcctttctttacatcatatgaaggagcgggacgaagaagcatttttcccataaaaaaagcctcattgcaaaagcaggaggctcagaaatcagtttttttaatttcaacgaagcggatatgatggtcttccgcttccagcaccttaaattcacacccttcggcatgaaacacatcaccatttttcagctccattttttgtgttaagagccagccggcaatcgtgtcaatgtcttcattttcgatggcgatatcaaggagatcattcacctcttctataagcgccttgccgtccatcacataatggtgttcgccttttttgacgatgtggggcatttcatcctggtcatattcatcacggatttccccgacgatttcctccaatatgtcttcgacggtcacaagtcccgccgtgccgccgtattcgtcaacgagaatcgccatatgaatccgctccttctgcatgcggatcaaaagctcctgaacggggatgctttcaatgactctgatgaccggacgcataatttcttttaattcaatggagcggccgagaaaatacgccttaaataaatccttattgttaataatgccgagaatgtgatctttgtcttccttaataaccggatatcgcgtataccgttcgttgatgatcaaatgtatggcttcatcaactgactgttcaagcgagatggcggcgatttcggtgcgcggcaccatgatttctctggcgacccggttatcgaattcaaatattttattgacgtaacggaattcagattgattgatttgaccttttttatagctttcggacaaaatcagccgcaattcctcttcactgaccacgacctcatgttctttcaccgaatgaaaaccgaacagcttgaccaaaaatccggctgaaccgtttaacagcttaataaacggatacatcactttataaaacagaatgagcggtttcgccgtccacagactgacggcttcggctttttgaatggatatcgttttcggcgcaagctctccgatgacgacgtgcagatacgtgacggcgataaacgccgcaataaacgtgacgacgtgcgtaatggatgacggcattccgatcaggctgaaaacaggatgaagaagccgctgaatcgtcggttcaccgagccagccgagtccgagcgccgtaatcgtaatgccaagctggcacgctgataaatattcatcgagatttgaaatcaccctgtgcgccgcgagcgcccggctgtctccggtttcaaccagctccgcgatttttgaaccgcggattttgacaatcgcaaattccgcagcgacaaagatggccgttaatccgattaacagcataatgagaatcagttttaatataagcaaaaaaacccctaccgcaaacggtaaggggccacctccttcgtgttaattctcatcacgaccatttaagaaaatcatcacaaaacgaagcagctcgaataatgaaacgagcgccgcagccacatacgtcagcgcggcggcgttcagcactttattcacgccgtgttcttcactgttgcgaatgaatccttccgacacgataatccgcttcgccctcgcgctggcattaaactcgacaggcagtgtgacaagctggaaaaaaacagcggccgaaaacaaaataatgccgagtccgattaagttcaagctgcccaggagcatcccgcccaagaaaagcagaggggcaaccccggaggcaaaattgacgaccggaaaaattttgtgcctcagcacaagcgcgccgtatgattcctgatgctgcaaagcatgtccgacttcatgggaagcgacggaaatggcggaaatggagcggccgtaatataccggctcagataaacgcaccacccgctccgtcgggtcgtaatggtctgttaaagtgcctcttaccggttctaccggcacatcatataaaccgttaatatcaagaatccgtcttgccgtttcggcccccgtccgctgactggaagcttctacgtctgagtatttctgaaaattgcttttcactttaaattgtgcccaaaacgacaatcccaatgcagcaattgttaaaaagataaacagcatattatcctcttcctttttctcttatatcgtacgatttgcttatatattattttaatgattgtccgctttcctgtacagaaatccgcttcttttttctgacaggaatcaaacctccgagcatgatgaggatacacccggccaatccgatgtaaaacggaaacgtgcctgcggtctcttttgcaaaaacaagccatgaaaatccgccggacatatgattgtatccattcaaatcgaaaataagcaatacggccgccgaagcgagcagctgcgctccggccagcaccgccagcagtttttgaatgactgtcatttgactcaccctttttcgatccgctttctttatcatatgaaaaaatgagggtgaatatgttttcggcgatttttgaaagacatcaaacgaactgggacatactgtataaaaaaagatacaggtgtgatcgacatgaaagtgacaaatggcgagaaagaacagctgagcaatgcgatagacagaatgaacgaagggcttgacgccttcatccagctctataatgaagcagaaaacgatgaacctctcatacagtttgaagatgagacggccgatttaatcagacatgcgcgtgactcatacggccaggaacagctggacgaaaaactaaacaccattattaagcagattttatccatctctctgtcgaaagaagagccgggcgaatgaaatcgaaccgtttatttatttcctggctgagatggccgttatatgttcggatcggactgatcattatcgcgttgattttattgttcggccaactcatttacatgcttgaaccgaagcaattcacgtctgtgtttgaaggggtttggtgggcggttattacggtggccacggtcggctacggcgattacgttccccagacgccgctcgggcagattgccggcatggtgcttgtattaagcggagcgagttttgtgaccgcctatttcgccacgctttcttcagccgtgttcagcaaacagcaccgctatgtcgaaggcaaggtcgcctttaaaggcaaggggcacgtcatccttatcggatggaatgagaagtcgcatatgctgcttaaagaactgcagcacatcgcgccgtcaaaaactgtcgtcctgattgatgattcattaagggaagggccgcttattgaaaacgtccatttcatccgcggacatgccgctgatgacagtacgctcaataaggcgaatattacggaagccgataccgtcattttgacagcggaccagcagaaaaatgaatccgaagctgatatgctgtcggtattaacgcttctcgccatcaaagggctgcatccgtccgtttattgtatcgtggaaattttaacggaacggtatgtcaaaaacgccgagcgcgcaggagccaataagattctgtgcacatcacgcctgtcgagccgggtgatgtttgagcattaccgggtcaagctgcagcttgccaaaccgcaaacgctgtcagatctgacgctggagaaaaaggtgcgcatcattcccgtccccgaggaattaaagggttcatcttatcatgactgtgcgctctattatctcaaacggaataccacgatcatcggcatacaaaaagaagaggggccgatgctgacccctcccctgtcataccaggtgctcgatactgatctgtttttggctctttaatgcagcaggacgtcttccagctctttcacaagcgagatgccgatatctgtatatgagcggtcaattgccgcatcccgccgtttcggctcggagaattggttgaataatgactcaaaaacaccgccgcctgcgtgatcatccgtttcctgctgataaacgtgcctcagcaaaaagggtgtgccgattgtaacggcggcccctcgttcatccaggtgtcccttatttgcttcaacagggatgcggagaaataaatagccgtcctgatcggaaattttgtaatcaaagaacccgcggtcatactcccaaccgcctccgatggtataaccgatcggcttcagcacctgttccagttcgcggagtaaaaacgattgcccttcaagtgaagatggaatgctgatcatgtgcatatgctcctttttgtctttagcgtccccgctctgcggcatcttcatacggcgcccgggaagaatcgggagcggcagacagacgccggaaagagataacggcgcattcaatcagaacatacgtcacaattgcggagagaacggcttccgttgaaatatagaaaacgacggcatagagacagcacttcgtgatcagcgtatgcatccggccaatcttcagtttcagccggaccatgtccgtaaacaagccgagagggaaagcgaaaaacaggatggtttgtaagagggattcaggagacagttttagtgccgaatagacaatagcggcggaacagacggaaatgacggcatgcttacataagagtcgtatcattcatcatcacacctttcacggtttaaaaaaggctgacccgtcatgctgagggccagcccttttttttatttttcaaggcgtttttcaagctctgcttttttctcttcaaagcccggtttgccgagaagcgcgaacatattcaccttataggcttcaacacccggctgatcaaacgggttgactccgagcagataaccgctcatcgccaccgctttttcaaagaaatagacgagatatccaaatgtatatgcattaagctccggaatattgacaattaagttcggcacttttccgtctgtatgggcaagcatcgtgccttcgaacgcttttttgttgacgaaatcgaccgttttgccggccaagtaatttaagccgtcgagatcattttccgcctcttcaattgtcagctcatgcttcggtttttcaacgtttaatacagtttcaaacagatcgcgtctgccttcctgcacgtattgaccgagagagtgaaggtctgttgagaagttagcggaagaaggatagatgcctttttcatcttttccttcactttcgccgaagagctgcttccaccattccgcaaagtattgcagcgcaggctcatagttgataagcatttcaatggttctgcctttattatacagaacgttgcggacgacggcgtattggtaagccgcgttctcttctaattccgagctggagaagtctttgcttgcatcaagagcgcctttcatcatttcatcgatatcagccccgcttaccgcaatcggcagaaggcctaccgcagtcagaacggagaaacgtccgccgacatcatcaggaataacgaatgattcgaagccttcttcattagaaagcgtttttaaagcgccgcgctctttatctgtcgtcgcgtaaatccgcgctttcgcttcttcttttccgtatttttcttcaagaagtttgcggaaaatccggaaagcgattgcaggttccgtcgtcgtgcctgatttagaaatgacattgatagagaaatcagcgtcttccaaaagatccataacatctttcatataagttgagctgatattgttgccgataaagataacttgagggtttttgcgcttgtctttcggcagaacgttatagaaagaatgattgagcgcttcaatcgccgcgcgggcgcctaagtatgaaccgccgatacccacgacgagaagcacgtctgaatctgatttgattttttcagcgctttttttaatgcgcgcgaattcttctttatcgtagttttcagggaggtccacccatcctaaaaagtcgcttccggcgcctgttttttcatggatattatggtgtgccgtttttacgaaatcacgtgcgtatgtaagttcatgttcattgaaaaaaggtaacgctcttgagtaatcaaagcgtacatgcgtcatttgcttgtccctccatcacggtgaattgttttctctttcactttatatgaactcacccgctaaatcaagtcatgaagaaggcatgatgaatacgggatttgcgctaaagatgcgttcattttttatacaatatcccggattcaatatggttatatttgtaatgatcgtgagagggataacgaatcgaatgttggtgatccaggaacgtatcacctttactttggagcaggatgacatccatcgccaatcccgatgggccggttctttttatatagtactcctcttgagaggctgccacgaagggatattaaggcataaatgtacatttttaaaaatagtgtctatatttggggtaacgtgttaagatgaaagtgattttaaaccgggaggtgattttatgactaaaaccattggtcttatttgtggaagtttacgaaaaaactcgtataatcgagcaattgctcaatcactgattgacttcgataatgcggctcaatttcgctgggttgaaatagacagtcttcctttttttaacgaagatttagaaattgccggagcaccagactccgtaacatcctttagagctgatatacaagacgttgacggcgtcatcattgtaagtccagagtacaattccggaattccgggggtattaaaaaatgcattggactgggcatcgagaccgcggacctcttctgttttaaacagaaaaccggttggcttaatcggagcaacccccggagggttcggtaccgcctttggccaaacgcaaatgagagaagtactcgaagctatgcaagtcaatgttttgccctttcaaaaaatgctgatttcgcaagtccatgagaaaattgattccgctcaaaacatacttacggatgaacaaacaaaacgttatcttcaacactatttacaacagttcatccattggattgatcatgctccggttcccgttccaaattaattgaaggatcatctccctcacgaaaagtcacctcagaaataactttctatctatacagcatatgaatagatttaccgttttcaattcacaaacttacttgccttaattcaaggaggatgataaaatgtctgatctttattcccgtctttcaaaagatgatgctgccgtgcttttagttgaccatcaaaccggccttatttccggtctcgtgcgtgactatggcgttgatgaatttaagaacaatgtattggctctcggtgatacggctaaattctttgatttaccggttattttaacaacgagttttgaaaatggacccaacggaccgctcatgcaagaactcgttgatctctttcctgatgcgccgaaaatagcccgtcccggacaaattaatgcatgggacaatgaagattttgttaaagccattgaagcgactggcaaaaaacagctgattatcgcgggggtggtaacagacgtctgcgttgcttttcctgcgctttctgccattaaagcaggctacgaagtgtttgttgtgacagatgcttcggggacgtttaataagcaagtagcagatgcatcattaacgcgtatggctcatggcggcgcgcagcttatgaactggttcagcgtagcgtgcgagcttcagcgtgattggcgcaacgatgttgaaggttttggcgcattaatctccagtcatcttcccggttatcaaaacttaatgggaagctatatgggggcgcagcgggatcttagtacacaaaatgcataaaaggagcgctgattgaatcagcgccccttttttaaattcgcggctcttcatgatttagattttgtgtaaatagatgatcggcaatcgcaaagttaattgatccttttctgctaaatgtacagaaacagggagtcaaatccgcatcatgtgagatttccatagttgtctcatggcaaggggtgtttcacttgctcttgatgcactaatgaagggactcccaaacggttgcatctgcatcttgaaaatctatttcatcttcaccccggccgggaatgtatcttacagtgacgcctttaagatggcaagtacgtcatctttgttcagtttttggaaattgccgaatccgccgtattccatttcttttgcggcgatgtctgcgatcagctcaagcttgtcttcaccgatgtcataatccgcaaggcgggacggtgcgccgaggcttgtccagaacgcggacaatttatcgatcccttcaagcgcaatttctttatccgttttgccttcagtatcaatgtcaaacatgttgagcatcaggtttttaaaacggtctacatttgtatccagcgtgtatctcatccagttcgggaacagaatcgcaagtcctcccgcgtgagggatgtcataaaccgctgatacggcgtgctccatcgtatgggaagcccaatcgccgaaatagcccatttgcagcgtgccgtttaatgcgatcgtacccgcgtataaaatcgtttcacggtgcttatagttctcaaggtcttccaaaagtttcggcgctgtttcaattaccgtctgaaggaccgcaaaacacattctgtcctgaagcggcgtgttttcaacattgtggaagtattgttcaaatacgtggctcatcatatccaccatgccgtatacggtttggttttccggaacgctgaaagtattctcaggatctaaaatggagaaacgcggatgagtgacattgctgccccatacgaatttttcgtttgtttcccaatttgtgataacggaatcagggttcatttcagagcctgtcgccgcaagcgtcagcaccgtgccgaacgggagcgcgtcctgcgccgttacttttttgctgtaaatgtcccatgcgtcgccgttatatttcgcaccggccgcaatcgcttttgtacagtcgatgacacttccgccgccgactgcgagaaggaaatcaatctcatgctttctgcacagctcaattcctttatttaccgtttccagacgcgggttcggttcaacgcccgcaagctcatgaacggctgcgccttcttcttttaagatgcctgttacttggtcatacaggccgttacgcttaatgctgccgcctccgtatacaagcagcacgtttttcccgtattgcttcagctcttttttcaattggtcgatttgaccttttccgaaaatcagtttcgtcggattgtagtacgtaaagttctccatttatcatgacctccaaaaaaatcgtaagggaattactataacacagaaaaaaaggagctgccaatccggccgccccctttatgttattacaatgatgctttcagtatcgcaagcacgtcttctttctgcagtgacttgaactgtccgaatgctccgtttgccatcgctttatctgcaatcgtatccagcttctcatcagaaatatcataatcagcgagtctgttcggagcaccgaggctcgtccagaaatcagacagcctgctgattccttcaagtgcgatctcttcatctgatttgcctgtctcgtcaatatcgaagacacggacggcaagctgtttaaagcgggccggattttctttgagcacatgtctcatccagttcgggaacagaatcgctaaacctccggcgtgcggtatatcgtaaaccgctgataccgcatgctcgatgttgtgtgtggcccaatcccctcttgcgcccattgacagcattccgtttaatgcgatcgtgcctgtatataaaatcgtctcacgaagctcgtagttctccagatcattgatcagcttcggcgctgtttcaatcaccgtgcgcagaagcgattcacacatccggtcctgatacggcgtgtttgacgtgtggtggaaatattgttcaaacacatggctcatcatatcgaccatgccgtaaatggtgtggtctttcggaacggtaaatgtgtttaccggatcgagaatagagaatttagggtaaacgagcgggctcccccatccgtatttctcttgtgtctcccagtttgtgatgactgatccggagttcatctctgaaccggttgccgcaagtgtcagcactgttccgaaaggcagcgcttctttcggctggtgttttttcgtgacgatatcccacgcgtcgccgtcatatttagcgcccgccgcgatggctttcgtgcagtcaatgacacttccgccgccgacggccaataagaaatcgatgctgttttctttacagagcgcaacacctttgttcaccgttgagacacgcggattcggctctacgcctgccaattcatgtacggtaactcccgcttttttcagaagttcggttacttgatcataaagaccgctgcgcttaatgctgcctcctccgtatacgagcagcacgttttttccgtacggtttgatttcttcaggaagtttttcaacctctccctttccgaaaatcaatttggtcggattccaatatgtaaagttttgcatgacatctcctcctttggatttatattatgcagaaagatgacgttcaatgtaaagcaatccgcttttttgacggcgcatcacatggtttacagacatcgaattccagggaaaggcacttgtacagcctgagacagtgtgtgattttacacggcggagaatgtagtatgcatagattctttgctttgtcacaatctataactgtttcacgaattcatagaggaggttgtttacatgagtgttattcagcgtatctgtctcgtattaacgattatcggcgctattaactggggactgatcgggtttttccaatttgatttagtagcagccatcttcggcggccaaggatcagctctgtcgcggattatttacggccttgtcggcatcgccggtctgatcaatctcggcctgctgtttaagccgaacgaagaaacatcccgcgaggaagcggcaaatccggaagtcagataaacataaaaaaagcaccgaacatacatatccggtgctttttttaatgattattttttgataaggtctttgcggttggactgttcaatccactcttcaagcttatctttcaatgtgttgaaaccttgcggagcagatgtttcttcagaagcttgagccgctttcggttttcttggtttgctttcttttctttcaggcgccgcttgagtcgcacggatagaaaggctgattttgcctttttcttcgtcaaccgcaagtacttttacttgtacttcgtcgccgatagaaaggtgttcgttaatgtcttttacgaaaccgtgagtgacttcagaaatgtgaacaagtccttgagtttcttcatctaatgcaacaaacgcaccatacgcttgtaatcctgttactttaccagtgtaaacactgcccacttcaaattttgctgccattcataacaactcctaagttaaattaaatacagattatacgcaatttaaaattatatcatacaagtttgtttttcgcaaagagaacttttttacatcatcatgtttaagcacagataaaggagggtatactatgattacgaaggctttctagtattccccccttttatttggatgcgaaccgggttcgtatctttttttatgcccttttttcaacaaaccgtttgattctgacgagcgcttcctgaatctgctcaatggatgtcgcataggaacatctgatgtagccttcgccgctcgggccgaatacattccccggaacgacggctactttttcttcaatgagcagctgttccgcgaattcttctgaactcatgccggtcgactgaatggaaggaaaggcgtaaaatgctccgccggggtggtggcagccgagtccgatttcgttcaatgtctccacaatcaggtttcggcgtctccgatagcttttcttcattctttcgacgtcttcctggccgtttttcagcccttcaagcgccgcgtactgagccatggaaggcgcgcacatcatcgcgtgctgatgaattttgagcatggcatccctgatcacgggaggcgccgccgtaaatccgagtctccatcccgtcatggcaaatgctttggagaagccggaaataagaatcgtgcgttccttcatgccgcggatggcccccatgctcatgaatggctcatcatacgtcagctcggcataaatttcatcggcaagcacgatcaagtcgtgtttttcagcgaaagcagcgatggattcaagctcttctttcgaatagacggaacctgtcggatttgacggcgagcatagaagcagcgcttttgttttgtccgtcagggccgcttcaaaatcggcggctgatgctttgaaaccttttgcagcgacagtctgaatcggcaccggtttcgcccccgtcaaggtcacgagtgattcatatgcgacaaaacacggttcgggaattaacatttcctctccaggattcataatggcgcggacagcgagatcaagcgcctggcttgctcctaccgtaacgatcagttcactgtcaggcgaataactcaggccgaaccgctgatctaagtagcggctgatttcttctctcagttcataaagacccgcatttgccgtataagccgtataaccctgttctaaagaaagaatactcgcttccctcacgttccaggccgtcacgaagtcaggctctcccactcccagtgaaatgacgccttccatcgtggcggccagatcaaagaacttgcggatgcctgacggtttaatctgctgcacgtagtcagataaataagaagtcttcgtttccatttacggagacaccacgattcttttgtcatcgtctccgctttcaaagactttgccgtcatgcttatattttttcaggatgaagtgcgttgtcgtggaaacgacagactcaagggtggacaatttttcagacacgaagcttgccacgtctgacatcgtgttgccgcgaataacgacggataagtcatacacccctgacatcaggtacactgattcaacttcctggaatctgtatatccgctcagcgacttcatcaaagccgacatttcgtttcggagtgacttttacgtcaatcatcgccgtgacgccttccaaaccgtcgactttgcgccagtcgatcatcgccgcataatcaatgatgactttttctttttcaagcttttcaatgatgcttttgacttcttcggcgggaatgtttgccattttcgcaatcgtttccgcatcaacgcggctgttttcgtctaaaatttctaatatttctgtttctttttcggtcagcttcatacgtttcacacctttgcattatcaaaaatcttcatgacattatatcacgattttcgacaaatgctaagaaaaacccgaaagaaaccagagctaaaatctgacaatcaaaaaagcctttacattacaacaaagaaaggacggcgaaggctctcatggaagctgtttcaccgattaaacgggccgcgatagacggagttgagctgtattacgagcattatgaaaatcccggcagacagacactcgtctgtgtacacggttttttatcttcggcattcagcttcagaaaactgatcccgctgctcagaaaccattatgatattatcgccgttgacctgcctcctttcgggcaatcggaaaagtcacggacattcgtatatacttacgcaaacctcgccaagcttctgatcggacttctcgaaaagctcggtatcagccgggccgcactcatcggccattcgatgggcggccagatttccttatccgcgtctcttctcagacccgagcttttttctaaaatcgtcctgctgtgcagctcggggtatttaaagcgctcgcacccgtcgattatattcgggacgcatctcccttgttttgacctgtatcttaagtattggctttcaaaagacggcgtgctgaacaacctgttaaatgtcgttcacgaccggacgcttatcgatcaggaaatgattgacggttacgaaaaaccatttacagaccgccagattttcaaagcgatgacaaggtttatcagacatagggagggtgatttagagcccgaggatttgaagaaagtgcaaaaccccgctcttttaatctggggagaagaagaccgtgtcgttccggtctcagtcggaaaacggcttcatgacgacctgccggattccattctgtattcactcaaggatacggggcacctcgtacccgaagagcgcccggagtttgtttcggagcggatttttgaatttattcaataaaaaaaccggcggaaccgccggtttttaaggggtgcaggagctgctttcttttatgaacagaagctgctcggcggccttttggcagccttcgatcggaagctttcgctcaaatgaagcttcaaagatatcctgaatggctgctgccagcttgtcggcacggtcttcactgtagacggcctgaacgatatcgacggcttctgtctcataaaaatcttctccatatttaaacgggtcccacttggcaatgattttcatcatttccatgaccgcttggctttcttccattttcatcaccgcttataataaagtttgcaattctattttatcatagatacgctgtgcaaaataatgatactacaggagtgacatacatgaactttgatcttcgagaaaaccgtcttggcacacaatcggtgaaatgggacaaggcggaagcgttattcggcgtatcggatgcacttccgatgtgggttgccgatatggatttccgcgctcccgaagcggtcactgacgccttaaaagcccgccttgaccacggcatattcggttatacgtctcctgacgaaaacacaagagaagccgtcgcttcatggcttgagacgcggcacggctaccggcccgatcccgcaagcatcgcgttcagtcccggtgttgtcacggcaatcagcatggccgtacaagcctttaccgaaccgggcgatccggtgttgattcaatcaccggtgtatacgcctttttatcagatgatcaaggaaaacaaacggcaggttttacataacccgttacgggaagaaaacggcgtctactgtatggattttgaggatcttgagaaaaagctgaacgattctgaggtcaagctgatgattctttgtaatccccacaatccgtccggcagagcgtggagccgggatgagcttatgaagctcggatcgctgtgcgccgcccataacgtcaccgtcgtttctgacgagatacattccgacttgatgctgtacggaaagccgcatacgcctttcgcttctctgtctgaggagtttgcgcggatttccgttacttgtgtcgcgccgagcaagacgtttaatattgccggcattcaggcatccgccattatcattcccgatcggtataagcgggcgaaattctccgccgcattgcatcagaacggaatttccagcctcaacacatttgcggttgcagcaatcgaagcggcctatacaaagggaggcccttggcttgacgcgttgattccttacattgaagggaatatgaaattggctgaggactttttaagaaaagaattgccgaaagtccgcatgatgaagcctgacgcttcctatttgatctggatggatttcagcgaatacggattttcggatgccgagctcaaagaaagaatgctcaaaaaagggaaaatcatattagagccgggaacaaaatacggaccgggcggcgaaggatttatgagacttaatgtcggctgttcagccgccgccgtaaaagaagggcttgagagaatgaaagcagcgttcgcttagcagcggaaagaacgcctttatcagatgagataagggcgttcgctttagagaaatatatacttttttttccggtaaagatgttataatagattcatatttacataggaaaggatttcgcataaatggagattgtaaaggattacctgcttcacttctcttttattttattccctatttttctttatcaagtcttctggctcagtaagcccgatttgcttgtgccgagagcgaaccgcctgctggtcgccgtatttgcagcgtcatcttccttattatgtacggcttttcccatccaggagcttcattccgtccgttacggtttgcagctgattcccattatcgtctgcctgctttattccggtaccgccgcaggacttgccgcaggggcggcatccgttttttttcagctcatatggtttgaaccttccgctctttttttcttatccttaattccttttttaatcatcatccctatccagctccaaacgaaatggccttttttttcaaagcggaagaaactgcttttcgctcttctcatcggctgcactgaaaccgccttattaaccgcatctgtcttcatctattccgcgaccaatattttcaattttcaaaatctatcttccgtttattatgaggcggcagtatccgttttttttcaagtcagcgcccttttgctgtgcatttatttgattgagatcattgatgagaatgcgtccatgcgggcaaggctgattcactcagaaaaaatggccgtcgtcagcgagcttgcggcaagcgtcgcccatgaagtccgcaatccgcttacggtcgtcagaggttttgtgcagctgctgttcagcggcgagcagcttcaggacaaatcccactccggatatcagaaacttgtgctgtccgaactcgaccgggctcagacgatcattacgaattatctcgatatggcgaagcaggatgactatgaaaaagaaaagtttgatatttctctgctcgtaaaggaaacaggttccttaatggagtcttatgccaattttaaatcggtgaccgtgactgttcaaagcgagcctgatttatatgtgttcggcgatgtaaaaaaactgaaacaggccttcattaatctgattaaaaacagtattgaagccgtgccctctgaaaacggccgaatcgaggtctctgtccaaaaacaggaagagatgattctcattcagattacggataacggaatcggcatgtccgatgaagaactgcagaaactcggcaagccgtattatacgctgaaaacgaacggcaccgggctcgggcttaccgtgacattctcgattattcagcatcatgaaggctccgtctgtttcaccagcggcgagcactcgggcacaacggcctcagtcaggcttccggcagctgttcactagccaaccgcgttgatcttttatagaataactagagagaggtgaacgctatgaatacgtttgacatcggcacaatcgtaaaagggttttataaaacaggagcatacataggggaagtgacagacgtcaggcccaatcactatttagtgaaaattaaagccgttctgacgcatcccgctcaaggagatcttcatcatccgaagcaggcggatgttccgttttttcatgaaagaagagcgcttgcattcggggaacagacaaacataccgcatcagatggtcaaaccgtttgatggcgaggtgcctgattatacggcttccttacaagcggcgtctgcccggctgaaagatcagcttacagcggacggctcagaatgggcggaacgttcgctcgacaacttggccgcgttagagcgtgactattttaaaagaacttgacccagtcggcatgattgggtttttttatgtggcccggcgaaacagttcagtcagatcgacgcgatcaccgatcgtcggaggtttcggtttttcaagatattgtttatcccgctcgacaagcttgaataatttgtatgtcgtccgcgcatcatccagcgctttatgatgcgtgcccgtccctttatcgccatactcttctgccgctttccaaaggccggtcaatgttctgtcgccgaagaagtttttgtattcaagggacagatcccgaagttctcctttgaacggaaaagggatgtggttaaacatgcaattttgctttaacactttcatatccatattgccccaggtgacgatcgtgcagtttttatcaggatcaagctcatttaatttgcggatgaattcattaaacgtgattccgccgtccacgtctttttgggtgatgttcagaaaggttttgcatcgtttcgtcagcttcggaaattttttcggtttgatataactcgaaaacgtttcagtcacttcatcattcactgtcttgacaatccccgcttcaataatctcgggaaagaaattttgcgggctgtattttccgtcaggcattgtaaattcaaaatcaataatgagcagactgcgctgatccactttttttacacctgcctttcctccgttcaaaaatgatattttatgatagtatatcagtttcccctctgaaactttcttcattttctaaaaataatgaattttcctatatccgcatcgaaaatacaaataccggattcattcctatatactaatgattagatacacgaaaagtaaagaaggtgatgttatttctgtccgtaagaagaacttcgtcgtcatttggattacaaatttctttatttccgccagcatgaccatgattgttccgtttctttcgttatatatcgaaacgatcagcccccattcgggcgggtatgtgcagagatggagcgggtatgtgttcggcgtcacgtttttaatggcgtttgtgatttccccgttctggggcagattcggcgataagcgcggctacaaaaatattctcttgattacaggaaccggcattgccgtcagcattttattgatggggtttgtgacatccgtttatcagctgtttgtcctgcggctgcttatgggtctagtaacaggctttgttccgacgtcgcttgccatgatttcggcgcagacgccgaaagagactgccgggaagacgctcggcacgctgcagatgggtcaggtgtcaggcactttattcggaccgatgctgggcgggatgctcgctgacagcttcgggtttacgtacacgttttttattacgtcttttgttattttcgcatccgtgcttctcgttttatttcaggtcaatgagcagccgctcggcgagaaacaaaacaaacggaaaacctattccagaaaacaggtgctctcttatatttttcaccagcccgcgctttgggcgatgatggtgcttactatgatcgtgcagaccggcaatttcagcattcagccgctgctcgctttatatgtcaatgagctgcacggacctgttaatttagcttttttctccggaatggcgttttcagcgaccggactcggaagcttattgcttgcccgaaaatggggggacttcggcgaccgcttcggccacagccggattttaatcgtgcttttgattgcctcagcggtgtttttcattccgcaggcgctcgcctcctccctctccattctgttagtcttcagatttctgttcggcatggtcatgggcggcacgctcccctgcattacggccgcaatccgcgtcagggcgccgggcagcatccagggagaggtgctcggctataacgtcagctttcgttttctcggaaatgtgctcggccctctgctcggaggtgcggtctcaagcggtttttccatttcggctgctttctacgtcaccgcctttctctttttaataggcgcggggctcttatggatggcgggacatctgcaaaaggatacagcgtcaaatgcgggctgaccggcagcgatcacgatttcttctaaatttaaccttctcgtattcttaaaagaatgatacgatatggctagaaatcaggagaaaagagagtgaccatggtacgtaaaataatcggatggattttgctgctcggcattatcccgttgtgtgcatttacagttattgcttccggcaaagaggtaaaacaaatcaagccttttgatcaggtgctcgataaacatattgatttaaaagcgatcaacctggttcaaaacagttacatgtatgacagggacggaagccttgtttctgagattgtcagcgatcatgagaaccgcgtgatcgtgccctttaataaaataccgaatgaggtaaaacaactgtttttaacctctgaagaccgtcatttttatgagcataaagggtttgactttatggggatggtcagggcggccgcctccaatttcaaagatcataaaattgatcagggcgccagcaccatcacccagcagctggcaaggaatgtgtatttaagccatgaacgcaccttcagccgaaaactgacggagctggcctattcctatcagcttgagaaaaaatacagcaaagatgagattttagaaggctacttaaatacgatttattttaataacggcgtatacggtgtcggttcggcggcacaattttatttcagcaagccgctgaaatctctcactttgggagaaatggcctttatctgcgccatccctaataaccctacattatatgatcctctcaagcattttgattatacgaaaaaacgacaagtcagattgcttaacggattaaaaaaagcaggcgttatatccgggaaacagctgaaaaaagccgaaaaggaaaagatcaagcttgatataaacgaaaaaacaaataaatatcctgactatgtttcctatgtaaatgatgaattcacacagcttgtttcatcatccgaaggctatgacaaacgtcttgaaaaagcttccggaaaggcgaaacaaaaaatacagagtgagctttcagacagagtcagcacattgttaaaagacggcgtgaagatttatacggcgctgaatccgtatatgcaaaaccaggtcgtcgcccaagtgaatcaaaatctgccgtatgcaggcgtccaaggcggagcggccgtgattaatcatcagacacatcagattatcgcgctttcaggcgggaaagattaccataaatatgatttcaaccgtgcctatcaggcatacagacagcccggttcatccattaagccgctgcttgattacggaccttatattgaaaagacaggcgcaacgccacacagcaagattgacgcaagcaaattctgcagtgcggattactgtccgcaaaactacaataaccgcacgtacggtacggtcacgctggaaacggcgtttaaatactcgtacaacacaccggccatcagaatcatggaccgcgtcggcgtcaataaggcgttcagctaccttgaaccgtttcatttcgcgaagctggtcagcgcggattaccgtctgcctgcggcgcttggcggttttacaaacggcatgacgccgcttgaaatgaccaatgcgtacaccacgttcggcaacaacggcgtttatacgccgagtcacgcgattacaaaagtgactgatttaaaaggaaaaacgatattaaaatggaaagatgagccgacgcaggtattcagcgtgcggaccaacatgcagatcaaagaaatgatgaaagccgtcgtcaaaagcggaacaggaaaaaaagcgaactttaaagctccgtacgtcggcggaaaatcaggaacgtcaaatgactatcacgatatgtggtttgtcggcctgacggacgcttatacgatgggggtatgggtcggcaaggatacaccgtcaagcgtcgaatatcttcatgacgcaagccctcagctttcgatctggaaaaacacgctgcaggcagcttattaaagataacggaggggatccgctttgaaaccagctcagcttccggaccgtgtacttttgtttgacggcgtctgcaacttatgcagcggcgccgttcaattcatcattaaacgcgatccggccggcaaaatctcatttgcatcattgcaatcagataccgcccgggagcttttggcatcagaaggacttccgacagaacaatttgacagcatgatttttatcgaaaacgggcggatatacaaaaaatccgcagccgtgttaaaggtttcccgtcatctccgcggagcctggcggctgtcagcggtttttttcgcagtgccccgccccctcagggacagagcctattctttcatcgcccggcgccgttacaaatggttcggaaaaagggaagcatgcatgctcccctcccctgagatcaaaaacagatttctgtcttaacaaaaatggctagcttacacaggtaagctagccattatgctattataaagcttgataaagatgtacaaaataccgataacaaaagtaaaccaaaacagaatctcaagcaatataaaaccgatcagcgaaacgatcgaaagtgtcgaatagattctgtacaccatgaaaatcaaataaacgagcgtaacaacggcaaataacgccgcaatccaaaaaccattctgcacgagcgcaaaggaaagaattcctccgcctacataaattaaagagcctaatctgatttttttcagattgtccccttcaggatcatttgtgaaaaacaaaagagacagctctgtcactgtgtttgcaatcagcttcaaagccgaaaaaagcataaaatacacaagggcgaacgctgcaaaaagcgccagtctgatccctttctcagagaaataatccagcatcccctgatacatgccgagcgtctgaagtatcttcatgacataaagcgaggtagaaatggataatgacgaactaaaaagcagaatcgcaacgagcggaaaataacccgtccaataagtatttttcatataaaaagtccctttctgtaatctacctcacttattatggaggacttaaaacacattgacaagataaaaaataccatttttcctcacttttacgaaataagggcctgatcttcacaaaccggctttttcggagtaaagtagaacgcgggaatgataaacgtaaggaaggctgttatgaaaaaaacattaaaattgcaaacccgattaacgatattcgtctgtattgtcgtccttatcgcactttgtatcacctttttcacgatcagcgtccaaacagcagaccgcgtgaaagaagaagaacggacgaccgcgctgcgcaccgcaaagctggtcgcggaaacaccgagtgtcgcgcgggcattgcaaacaagaaaagggctgaaagagctccgggattatacattagacgtccagcatacgacaggaaccgaatttgtcgtggtgatggatatgaacagcatccgcctcacccaccccgacgcaaataaaatcgggaagaaattcaccggcggagacgaacagccggcgatgcacggacatatcaaaacgagcacatcagcgggaactctcggaaaatccatgagagccttcgtaccgatctatggaaaagataaaaaacaagtgggcgtcgtttcggtcggaatttcgcttaacaaaatacaggatgtcgtcagccacagtttgagaccgctttatttcatcatctgcgtaagtatttttgtcggcgtcatcggagccgtcattgtcgcccgcaccgtcaaaaacattatgtacggtcttgagccttatgagatcgccaccctcctcgaagagcggagcgccatgctcgaatcaacgaaggaaggcatcctggcggttgacgcgcgtggaaaaatcaagctcgccaatgcggaagcgaaacggctttttattaaaatgggtattccgactaatccggtcgatcaagatgtgaacgatattctcccgaaaagccggctgaaacaagtgattgaaacgaaaaaaccgcttcaggacagggatatccgcattaacgggcttgagctggtctttaatgaggttccgattcatctgaaaggacaaaccgtcggagcgatcgccacgttcagggacaaaacggaggtcaaacatttagcagaacagctgtccggtgttaaaatgtatgcaaacgcattaagagcccagtctcatgaattcatgaataagcttcatgttattttagggcttgtccagttaaaagaatacgatgatctcggcacttacattaaagacattgccattcagcagaagacggaaacaagcgagattataagtgatgtcaaaagtccggttctcgcagggtttcttctaggaaaacaaagctacatacgcgaacagggcgctgatctggacattcagctcggcagcctgatcccgaatgcggcggatccggccgtcatccatgagctcattacgattatcggaaacctgttaaacaacgcgctcgacgcggtggcgcagatgccgaaaaaaaacattacgtgctcgatgcggtttcaggatcgccagcttgatatagagattacggacacgggagccggaatgtctgcggcagaccaagcccgtatttttgaacaaggttattccacgaaagggacaaaccgggggttcggcctctatttcacccagcaggcaacagaaaatttaaaaggccatatgattgtgacaagtgaaaagaatgaaggaacgactttcagtcttcgcattccgtatgaaccgaaggaggaaaatgatgattaatgtactcatagttgaagacgaccccatggtgggtgaattaaataaacgctatctcagccagattgaaggatttcagctgaaagggatcgcatcatcctttcaaagcgcgctgcacgtgctgagcgagcatcatatcgatcttatccttcttgacatttacatgccgggaaaaaacgggcttgagctattaacggaaatccgcaaacaaaatgaatcggttgatgtcatcgtcatttcggccgcaagcgagctggacgtcatcaaaaaaacgcttcggtacggcgccgtcgattatttaatcaaaccatttgaatttgaccgctttcaaaccgctctttccgactacagacgcaagcagaaagtttatcaatcacacagaagcatgacacagaaagaattggatgccgagctttttcaaaagaaagaagcggcggaaaaggttcaccttccgaagggattgacaaaaagcacgcttaaactcatctgggcgagcattgagtctttcggtgacggctcttttaccacagaagatctcgccaagcatactgaaatctcgcaagtctccatccggaaataccttaaatttctggaagacatacaagtgctgaatgtagaaatggcgtacggcacgatcggcagacccgtcttccaatatcatatcaacaccggcaatgtcagcagcatcaaacaatatttataatgtcaaaaagcgccgtccagctgtgaacggtgcttttttactgtcatatcccgtgacaaaaggcttgagattccttttttgtatgctatataaggataatgacccggctgatcctcctctgttttatccaaatgaggaagccgattcataaaatttatattttttaaaaaataagcaaatttctatttatttatggcgggtaaaatgataaattatgattggttagcagatcttttcagataagtcataagtcccgaacacggaagagacagccgctcaaggcgggaaaaagagagacgtctcatcattattatcagaaagttttttcgattctgcatccggtacggggactcaagtctgaattgaacagcacagccatattttacaggggggttatatctttgaaaaaacgcaaaatcggaatggcgatggcgctcatcgcggcggccggaaccatattaagcgcatgcggttcaagtgacaaagcaaacggctccggcagcaaaaactttaccgtcggcatggtaacggacatcggcggtgtcgatgacaaatcatttaaccagtccgcctgggaaggtattcaggcattcggaaaagacaacgggcttacaaaaggcaaaagcggttttgactatcttcaatcaaaatcagatgcagattatacaacgaacttaaataaattagcgcgggaacactttgacctgatttacggcgtcgggtatctgatgcaggattccatcagcgaaatcgccgatcagcgcaaagacacaaattttgcgattattgacgccgttgtcaaaaaagacaacgtggcgagccttacatttaaagagcaggaaggttcattcctcgtgggagcggctgctgcgctatcgagcaaaacgggaaaagtcggattcgtgggcggaatggagtctgaattgatcaaaaaattcgaaatcggcttccgcgcgggtgtacaagccgcaaatccgaaagcgaccgtcgaagtgaaatatgcgggcggatttgacaaagccgatgtcggtaaggcgacggctgaaagcatgtacaaatcaggcgttgacgtcatttatcacgcggccggcgcaacgggaacgggcgtcttcacagaagcgaaaaatctgaaaaaagaagatccgaagcggaacgtatgggtcataggagttgataaagaccagtacgcggaaggtcaagtcaaaggcacaaaagacaatgtcactctcacatcaatggtcaaaaaagtggatacagccgtggaggacttaacgaaaaaagcgagtgacggcaaattcccgggcggcaaaacattaacatacggtttggcgcaagatgcagtcggcatctcagatcacaaggagaacctttctgacgacgtcatcaaagcaacagacgattggaagaagaaaatcgcggacggactcgagatcccttcaactgaaaaagaattgaaatccttcaaggctgagtaagaaccaggggataaggagacttccgtgcttatcccctctcttttatgaaaagagcggtgaaggaaaagctgcatctcttgcagcttttcttttgccaagctctttctcatcaaagtatttctgaaaaggagcgtcaaatcggtggattatatcattgaaatgcttaatatacgcaaggagtttcccggaatcgtcgccaatgatgacgtcacgcttcaagtgaaaaaaggcgaaatacacgcccttctcggtgaaaacggcgccggaaaatcgacactcatgaacgttttattcggcctgtatcagccggaaaaaggcgagatccgggtgcggggcgaacgcgtacacatcaacagcccgaacaaagccaacgatctcggcatcgggatggtgcaccagcattttatgcttgtggatacctttaccgtctcagaaaatatcattctcggcaaagagccgaaaacattcggccggattgacagacagcgcgccgcccgggacgtgcgcgatatttccgaccgttacggcctgcacattgatcctgaagccaaagttgccgatatttccgtcggtatgcagcagcgggcggaaatattaaagaccctctaccggggcgccgacattctcatttttgacgagccgaccgcggtgctgactccgcacgaaattcaagaactgattcagattatgaaaaatcttgtcaatgaaggaaaatcaatcatcctcatcacccacaaattaaaagagattatggaagtctgcgatcgtgtcaccatcatccggaaaggaaaaggcattacaacactcgatgtcgcacatacggatcaagatgaactggcaagccttatggtcggacgcgaagtgtcattcaagacggataaacaagcggccgatccgaaacaagaagtgctttcactttctgatgtaacggttaaggacgcgcgcggcgttgaggcggtcaaacagctctccctctcagtcagagccggtgaaatcgtcggcattgcgggcgttgacggaaacggccagtctgaattaattgaagccattacaggtctcagaaaaacaaatgccggcacgatcacgttaaacggcaaacagctgcaaaacatgccgcccaggaaagtcactgaagccggcatcgggcatattccgcaggacaggcataaacacgggctcgtccttgattttccgatcggagaaaatatcgtgctgcaaagttattaccaaaagccctactcttctttcggcatattaaataaacacacgatttatgacaaagcgcgaagcctgattgaagaatacgacgtcagaacacctgatgaatatacgcctgcgcgcgctctctccggggggaatcagcaaaaggccattatcggccgggaagtggacagaaatccggatcttttaattgcggcccagccgacgcggggactcgatgtcggcgcgattgaattcgtccataaaaagatcattgagcagcgtgacgccggtaaagcggtgcttctgttatcttttgaacttgatgaaataatgaatctcagcgatcgcatcgccgtcatctttgaaggcagcatcatcgcaaacgtcaatccgcttgaaacaaacgagcaggagctcggacttttaatggcgggaagtaagcaaatggaggcggggaaaacacatgattaatcgactttctcatctggctgtgccgctgattgcgatcatccttggattagctgcgggtgcggtcatcatgctcgccagcggctacaatgtcgtaagcgggtattcggctctttggagcggcattttcggtgaagtgtattacatcggggaatcgatccggcagattacgccatatattttgtccggattggccgtggcattcgcatttcggaccggcctgtttaatatcggggttgaaggacagctccttgtcggctggaccgccgcggtgtgggtcggcgcttcctttgacgcccccgcttacatccaccttccgctttcgttattggcggctgcggctgcgggcggcatttggggcctgattcccggatttttaaaagcccgtttttttgtccacgaagtgattgtcacgatcatgatgaattatatcgctcttcatttaaccaattatctcatttccgatgtcatgacggaccaccgggacaaaacagacaaaattcatgaaagcgcgtcgctccgctcgccgtttttagagcagctgacagattactcccgccttcactggggcattctgatcgctctgtttgcggcagtcctcatgtggtttatcattcataaaacaaaaagcggatttgaattccgggctgtcggctttaaccagcacgccgcacaatacgccggaatgagcgtcagaaaaaatatgatgtacgccatgatgatttccggcgccttcgcggggcttgccggcgcgatggaaggactcggaacctttcaatacgcggcggttaagggcgcctttaccggcgtcggcttcgacggcattgcggttgcgcttctcggcggcagcacggcaatcggcgttgttctggcggcatgtcttctcggcggccttaaagtcggggcattaaatatgccgattgaatccggggtgccttctgaagtcgttgacatcgtcatcgccattattattttgtttgtggcatcaagctacgccatccgtctcatccttgataaattgaagaaaaagggggcgaagtaagtggacttcctgcagattttatccattattgtcccggcaacactcgtatatgcggctccgcttattttaactgctctcggcggcgtgttttctgaaagatcgggagttgtcaacatcggtcttgaaggactgatgattatcggcgcctttacaagcgtcatgttcaacttatttttcggacgcgagcttggcgccgccgctccgtggctcgccttggctgcggctatgattgccggcggactgttttcactgatccacgcggccgccgcggtttctttccgcgccgatcagacggtaaccggtgtggcgatcaatatgctcgcgttaggagcgacactgtttatcgtcaagctgatctacggaaaggcgcagactgataaaatcccggagcccttttacaaaacgaacattcccgggttaagcgatattccggttttaggaaagattttcttttccgacgtatattatacgtcgattttagccatcgtactggcctttgtttcctggtttattttattcaaaacgccgttcggcctccgcatccgttctgtcggggaacatccgatggcggccgatacgatgggaatcaacgtgttcggcatgcgctatatcggcgtcatgatcagcgggctgttcggcgggctcggcggcggtgtatatgcttccacgatcgcgcttgatttcacgcactccaccatttccgggcaaggctttatcgctctcgccgcgctggttttcggcaaatggcatccgatcggcgcgctcggggcggcgctgttcttcggatttgcgcagagtttgagcattatcggctcgcttttgcccctgttcaaagacattccgaatgtatacatgctgatggctccttacattctgaccattctcgcgcttgccggcttcatcggccgcgcggatgcgcctaaagccaacggcatcccttatattaaaggaaaacgctgattgtgacacaaaaagagttccgcaccccggtgccggaactcttttcatctatatacgattctgatatactcacgcggctgaaacggtgttagcattgattcagccgcactcagcttgtcttctgcgtattccgcaccgagaaaaaaacgctcccaatcatccgcctccgtctgctgccgcgttttgcagaaatcatcaactatgaatgttcctgcaataatagaacaaaatattccaatacaggccgccgcctttctcttcatctgaccagctccttttttaaagcttgatctgaaagataaatgtatatacaaagatcaggatatttgataaatttattttaggttcaaaagaccacaaaacacagagaggaatacattatgccgtagcagggtaaaaaaaagtgcgatataatttggactgggtcctatgaccgtgaattgattgattcactcttacataaagcagttgcttgatgaaaaaataagcaaaggaggtcttctgttgcagctgttacatttcgcgattttggcgccttttttatttgcatttatcgttccctttctttataaacgggtaaaacaagtccatacaggctggtttgtgctgatagtgcctgttgtgctgtttgtttactttatcagcaagctccctgtcacaatggctggggaaaccgtccggtatgcggccgaatggattccgtccctcggtattaactataccgtttatattgacggactcgggctgttattcgctttattgattacgggtatcggctctttagtgacgctttacagtattttttacttatcgaaggacaaagaaaagctcggccccttttatgtgtacctgctgatgtttatgggcgcgatgctgggcgttgtgctcgtcgataacgtcatcgtgctttatatgttctgggagctgacaagcctgtcatccttcttattaatcgggtattggcataagcggaagaaatcacgctacggggcggaaaagtcactgctgattaccgtcggcggcgggctgtgcatgcttggcggctttatcctgctgtatctgatgacggattctttcagtatcagggaaatggtcaaccaggtgcatattatcgcaggccatccgttctttattccggcgatggttctcctgttattgggagcctttacgaaatcagcgcagtttccgttttatatctggctgcctgatgccatggaggcgccgactcctgtcagcgcctatctgcactcggctacaatggtgaaagcgggcatttatctgattgccagattcagtccgatttttgcattttcacccgtctggttttggacggttgcctcagtcggtctgatcacgatggtatgggcttccttcaatgcgatgaaacaaaccgatttaaaagcgattctggcattttccacagtcagtcagctcggtatgattgtatcgatgctcggcgcaggagccgccgcgcttcattaccagcattcagagtattttacggcggctgtcaccgcggctgtgtttcacttaattaaccatgctacttttaaaggaagtttatttatggcggtcggcattatcgaccatgaaacgggaacacgggacatccgcaggctcggcggactgatggcgcttatgccggtaacgttcaccgtttcactgatcggaacgttttccatggcaggcctccctccgtttaacggctttttaagtaaagaaatgttctttacaagtatgctgcggattgctcatgcagatattttcagcctggatacgtggggcgtgctgttccccgttctcgcatggatcgggagcgtcttcactttcatctacagcatgaagctgtttttcagaacgttcagcggcgcgcgcaaacctgatcagcttgaaaagacgccgcatgaagcaccgctcggcatgctgatttcgccggtcattcttgccgcttgcgccgtcagtctgttttttgcaccgaacgttttgtcttacagcctgattgaaccggcgatgaactccatttatccggctctgttaaccggcggagatacattccatgtccatatttcccagtggcatggggtgacggctgaggtaatgatgaccctcggcatcatcattgtcggcacgatcggttacgtaacgctgtctaaatgggagcggttgtacggtctgtttccgaaaaaactgacgctgaacaagctttacgatgcggtgacgggcagtatggaaaaaagatcttaccagctgacgtcatcttatatgaccggatttttgcgggattatctgctgtatatctttgcggcgtttatcattctcatcggagcggcgttcgtcacaaaaggcggcttttccatgacagcgaaaggaatggctgaaatcggcctgtatgaaatcgtgctgtccctcgttatggtgagcgcaacgattgcgactgtgttcgccaaatcgcggctgacggccattatctcactcggtgttgtcgggtacacactcgcgctgtttttcgtgattttcagagcgcccgatctggcgctcacgcagctcgtcattgagacgatatccgtcgccttgtttcttctttgtttttaccatctgccgaaaatgcggcggaaaaagaagacaagaacattccggatgaccaattttatcatttctctcggtgtcggcgtcatcgtgacaatgctcggaatcgcgtcttccagcgaaaaaacaaaagacagcatctcctcctttttcaccgcttacagccataagctcgggggaggaaacaatatcgtcaatgtcatcctcgttgatttcaggggatttgatacgatgtttgaaatcacggtgctgtcgattgccgcactcgggatttacggcatgatcagaacgaaagtaaaagaggagggagaagagcgttgagacagcaaaacacaaacgacatcatccttcagacggcaacgaagcttgtatcttttatcattctgcttttctctttctatttatttttatcggggcataacgcccccggcggaggatttgtcggcggactgattacgtcttcggccatcgtgctgttgcttttggcctttgatttaaaaaccgtcaaatcgattttgcccgtcaattttatttatgtggcgggcgcgggtctgcttatcgcgattgcaacgggtgcaggttcgttcttattcggagcaccctttctcacccatacattcggccattttcatctcccggtgcttgggaatacggagcttgcgacggccactttgtttgatttaggtgtgtatctcgttgttgtcggcgtgacgatgaccattattcaaacgattggagaggaagaataatggaaatcttaatgtctgtcattgccggtattttgtttatggcggcaacctacctgctgctttctaaaagtctgctgcgcgtgattatcggcaccgcgcttttaagccacggcgtccatttgctgctcctgaccatgggcggactgaaaaaaggcgctcctcccatactgggcggaaaaagcacgtcgtttgtcgatccgctgccgcaggcactcatactgacggcgatcgttatttcgttcggcgtcacgtcctttttgcttgtgatggcgtttcgcgcctatcaggaactgaaaacggacgatatggatcgaatgaggggaaatgatcaacatgaataactttgtgatattgcctattctggtgccgctgcttgccgcagtgctgctgatttttatgaacaggcacgtgatgctgatgcggatattcagcactgccgcttcctgtgtctccatcgtcatcagcgccgctctcgttcagacggttttcacacacgggattcagacgctgacactcggcggatggaaagcgccgtacggcattgtgctcgccgcggatcagctcgccgcactgcttgttttgacaaccgccacaatcgggctgctcgtcaccctgtactccttccgctccatcggagaaaaaagggagcgcgctttctattattcaggggtgcagtttcttctggccggcgtaagcggagcgtttttgacgggtgacctgttcaacatgtacgtcttttttgagcttctgcttatcgcgtcctacatgctgatcgtgcttggcggaacgaaaattcaattaagagaatcattgaagtatatcgtgtttaacattgtgtcatccgcgttttttgtcatcggcgtcggttacttatatgcggtgacgggcacgctgaatatggctgatctaagcgtaaaaataagtgaatcgggccagaccgggctgataaccgtcatcggcgtccttcttctcgtcgttttcggtttaaagggcgggatattcccgctgtatttctggatgccgggctcttattacgccccgccggctgcgatttcggccttattcgggtctcttttgacgaaagtcggcctgtacgccattttaagagtattcaccctgatctttattcacgatacgggctttacccaccaattgatgatgtggcttgcgatgctgacggtgctattcggcgtcatcggatctatcgccttttcggatgtcatgaaaatcgtcatctacaatattattacagccgtcggcgtgattttgttcggcattgccatgaacacgccggcctccattcaaggagcggtttattacttgattcacgatatgctgattaaaggagcgctgtttatgctcgccggcacgcttatcgcattgacgggcactgccagcctgcataaaatgggcggattgatcacccgttatcccgttttgggatggatgttctttatctcagccatatctctggccggcatcccgccgttcagcggatttgtgggcaagctgaagatcgcggaaggcgggttcgataagggggaaactttgttttccgtattgattctcttatcaagcctgcttgtgctctattccgtgctgaaggtgtttacgacggctttttggggggaagaaaaagaagtccccggcgcaggcggacggtccgcaaaaggacttctttatccggcagccgcttttctccttttgtcgcttctgttcgggctcggaaccgaatgggtttcaccgtatgtcaatcagacggctgagaatctgctgaatccggaaaaatacattgaagctgttttgaaggagtagatggcatggcttttcaactattattaaatgttcttctcgctgtttgctggatgtttctcacaaacagcctcagcgccgggggttttatgaccggatttatcgcgggcttggcggcgctgttttttttccggcgcttcttctcgcggccgttttacatttggaaaatatggtcagtcatcaaactggcgctgatctttataaaggaattatatttggccaatgtcagcgtactgaaaaccgttatatcgccgaaactgaacatccgcccgggcattttcgcgtttaagacggaattgacggaggattgggagatcacgctgctctcgctgttaatcactttaacaccgggtacgctcgtgatggatatctccgatgaccggtcgattctctatatacacgccatggacattgaagatgcggagaaagcgatccatgacatccgcgtctcttttgagaaagccattcaggaggtgagccgctgatgtttacgtttattctgcaattatcactcggcattatggcggtttcgactcttctgtacgtcattcgcgtcataaaagggcctacgataccggaccgggtcgtcgcgcttgatgggatcggcattaatctgattgccatgaccgcgcttgtatccattctcttaaacacatcggcctttttggacatcattctgctgctcggcattttatcgtttatcggcacgattgcctttgctaagtttttggagaaaggagagattatcgaaaatgatcgaaatcgttaaatgggccgtcgccgtttgtattctgatgggatcgctgatctgcctggtcgcgtctttcggcacactcaggcttcctgatgtgtatacgcgcgcccacgcctcttcaaaaggctcgacactcggcgttaatttggtattgctcggggtgttaggctacttgtggatgctgaccggagaaatttctgtaaaaatactgctcggcatcatttttatcctgctgacggcgccggtcggagcgcacctcatatgcagggccgcgtataattcgggagcggcgcttgataaaagaagcgttcaggatgattacaaagggatcagaaactttgtgatcaaacgtaaagaagattcatatttgtaaaaacaaacagccggacgattcagggttccggctgtttgtttattttgttataacagccagcgtgcagcgagaaatacagatcagcctttcccgttcatcgaaaatgttaatctcgtacacaatggttgccctgcctgtgtgaacgggtttcgcaatcgccgtgaccgtcccgccctctttcacggatttcaaatgattggcattaatctcaagcccgacacacgcctggttcgaccggtcgataaaatgctgggccccgacacttgcaacagtctctgccagcgctgctgacgcgccaccatgcagatatccgaaaggctgcaccgtcctcttatccaccggcattaccgctacgcatctctccgccgtgttttcagtgatttcaataccgagtgcgccgagcaatgtattgttcagattcataggtcattctcccttcaagatttatagtacgttgtctgacttggcgatcagcaccgcttcagttcgggagccgacattcagcttgttaaaaatggatgtcaggctgtattcaatcgaccgcttgcttaagtgaagcgcatctgcgatttcctgattggtcaaacctttttcgacctcttggagaatatggcgctctctcggggttaaccgatcctgctcactttgaggggaagaagacgtttttgttttttgctgggtcatcagctgtttgaaataggagaaatcaactaaaatctgtccgttgagcacgtgatatatgtattgcatgattttctctttagattcggttttgctgatggcgccatgcaggcccgcgcggatggattcttcaaaataatcttcaacctcatagcctgtgtagacaatgattttacagagaggattctcttttaagattttcttggaaagctctatgccgctgatgtcatcacccagatttaaatccattaatatgagatcgtaagctgaaaaatcatgccggagaacgaattgttcactggcgtcaggactgaggcaatcgacagaaagattcgtgtccgtttccagaatcgtcttggtgccctccatgacagccggatgatcatcaatcactagtatctttttcatggtttcctcccttttactcactcatttccattttattaaaaagacttggcttctgccaagtcgatttggtgataaattggttacaattccatttcaatatctactttaaaaccgtttccttcacttgtgtcgattttcatccgtccgtcaagcgcccggacgcgctccttaatacccgaaagacccatgctcatcgactgcccgccgccttcttcctgattgcatccgacaccgtcgtcttcataatgcagaatcactttattttgaatgctgatcagcataatcagcacctcattcgcctgtgaatgcttcatggcgttcgaaagaaattcctgaatgatgcggtacaaattcagctgcgtatccaaatccagagccgccgtaaaccggcccgtattcagacggatatgaaacggcgcacgctcctgctgctgcgcggcaagcttggataccgccttgaccagacccaaatcatacagcagctgaggacgcagctcatggcacgtctcccgggtcatcaaaatgacatccgacatctgctcattcatctgatgaagcttgtcctgcacctctaactggcaaggctcctctttcttaaaatcggccagaaacagctcacactggcgcttcaaagaaatcaagtcctgcagcactgaatcatgcagatcacgggccaaatccgaacgctgcttttcctcgatcgtaaacatcagctttttgagccagaccgggtttgagccttgttgttttagatcttgtaaatggttcatgagttcttcgatctgtatcacgttttccatagagacactcgtatagaaagacaatgttttcagccatgaaatctcatcccgtgtcagtctcggtgtattaatggaggacaaacaaagcaaaacataagaacttcccccgcgttctcctatcttgattaagaaaccgcggtttagctcaatgatttttccaatctctgaagtaaccttcttaaattcttttgaatacatttcccaatcaggttcattatcccttttatcatgatataaaatgtcaccctcagaggtaacttcaaagacataagctttactgacaagtagaacatccagaatcgtcttttttagttctttaaacatttgttttaaagatgttatgcttctgataagctgagtatatttgaatatactatcttgataattaaatttttcagaaaaacgttttaaccgaaatttataatccattacttctttaaaataaaaaatgacaaatatcataataaagaaaaatacagtttgctgagcaggattcatttgtatatctattgactcgaaccaagctgaaatcccaacaataaaaagggctggaactaaggcaagcaagccatagtacctcatcctgcctaaaatgaattcaatatcaaaaattttgttagctacgaactggtataccaaccccaatgggataagcacgagcagggatgccgctgccaacgcatctaatatataacttcctgtcaaaataattgggattacataaaaaagcaaaaagggcaaaaaagagagcgtgtttgttaaaattaaaatcttaagaatataagcatgttctgaatacttgaatttatacagatgatagaaaacagatataaatgcatagagagtcacgaagaaaaacgatactaaatttaaatttgttgtgaagtcatatgaataaatatgtcgaaacggttcgtttaagagattaattatcggtatgatatatagaaaagaaatcaaacgattggcaaattttttacctaattccttgaaatactcttgaataaactggagataaaatataggtgaggcaatgaaggtaaacaaatttatatatctgttaaattcatgacctcttgagggaccaccagcactcatataagctattgagatatctaacaggaagagaattaggacatacccagctatcgattttctggtttgactcacctttacaatataaaatatgcatattaaactcaaaaaataaaatacaaggggaaggacaaataaaaagtaactgtagtatccatttaaattaacaatatcaaaatcatctaaatgaatttgctgtccatttctttttatatctaagctcttaacgtgatagagagtatccccttttagatattttaaagatggttttttattattaattttgacaatcatatcaccttgttttaaacctacaaattttccatacgaggtttttgacatttcagcaacttcgagtactttatgcttattttctacaattttcgtgcctacaataattccatttatgttaataaaagcgacataacaaacatagataacacttaaaataataatggatattgtaaatggctttataagcttcttcaagatttacacccttcgcttattattcattatcccattttttattgtccgcacccatcattaaataattctcaaaccctttaatgataatttgggtttgtatagagtcataaccgataaggctagcttcattgcttttcagtttctttaatacatcaggataattcaaaaaataatttattaaattctgcatcttcatcatccttcttattattcttattattcaacaagtgtttttttattatttttatcttctttatatctaaatttaaattttcaacttcagtttcacacttatgcatgtatagttggtataaaaccgaaacatattgagatgctccagaatcatacagcttttggataaactcttttttattaagccgcagttgcgaatataatttttgatctgagaatatacaaagcaattcttgagaagacttattaaacaagcgcttaagatataaattaatcaatgtatgtttatctttcagaatatcactagtattatccttaaaaatagcatgataatcgccggaaatttgttcaaatatccctttataataggaataactttcaacagatttattgaattctccagttgctaaaagcgtaccagtaacatttgctaacgcaaataaacttccgcattttaacttgattacctctaaacattcatcttctgtctttggtttattgatcaaatcatcatgttgaccctgcattgcatcttgaatatattttaatacatacttaatcactaaaggattcgtactaatcgaattaatgctttgcaatcctgctgtgtataatgaaaatgctgcacttaatgctagtgaacgatctatcttcatccaaggagcatctcgattatcctcatcttccagatcatcaattatatcggaagtaagtgtaagaatttcaatagcggcacctaagttcactgcggtttcttgattttcgccgtcaaagatcacataatgcaaaacagctgattcagctagagaaaaatttttttttggttcaataaaactgagaaggagctgcattagatgttcattaaatatgttccgctctattatactcttcattctattcttgatttggttggcatctaaacatatttgctcaataattgtcttcaccctcccattctattttactaaatgcaggtgatgaaagacagcaggtttttcgttttttaacaatcgtataatactttatccatgaaatggataaaaaatgcacaaaaaaaagacttgtttccaagtctttttaagaaattttcattgcatatgagaatttatcgagctgatcaatgcttttgttaatgtttcgtaatgagtcggttgtttctctgatatcattttcaagtcggaataataattgctttacttcttctaatttgttttccaccgtttccacactcctttttttgaaagatcaatgaattgtgtatggtgaacgagtcctaggtatttgatctgttactaatagtgtaaacgtttttgcgggatttttcaccgaaaagtatgtgtaaaagtatctgcgtgacaccgcaaaccgtggtaattctatagtcccgaatggagcatttagcgaacaggactatataactaccagaaaggcagacgtttaggatgaagcagaccaatctggcggttctgctgtttttttaacggttttccgacaaaccggcaaggactatagtccctgccgtcgcaatttcaaaacagaatgggcgaacagcgtcgcataaccaccgacaaacaccgaaaagaccgcaacccccgcattgtggtctttttgcatgtcataactcgttatcatgccgcctatactctataacgaatgttttctcaggaaggaggccgccgtatgcattatgtgtatccatgctgtcctgttttcgccgcgccataccggcatcctgcgcccagtgccccggttcacgcagatattttgacagcgtccgcaaaagaggctgcgggcatgctggaggatgcgcgcctgctccttgcgcggctgtcggcgtcaaaagagcttgcgcgccgcattctcaccgcagcgcaatcatctgacaccgcagcggtcaagcggctcattaagcagaccggcatcaaaaatgactttgacgtgacgtataatcccgacggcatccgtgtcagtctgatcagagagcaaagccggtttaccatcgccctcaggtggtcggcttaaagcggctcaatccacgatcagctgccggcaccattcgatcgcctgtaagtaacattcatacgcttcttctttgttcagttcttttccccactcgtcacagtcccagttgttgcattcaatggctttgacgaacgcgagcatcttataataatcgttttcataaccgagcagcgcctgtccgacttcatcgattaaaggcagttctttgatgatatcctccagctcccggtggagaagcgtatcgatgagcgaaaacatgccgatcagcatgtaagaagagggctggggccttccggttcttttcgccagcagttcgcacagtttggccctgattaaggaaatcttaatgatttctttttggcttgaatggcttttcgccgttaaatctctgaatgaaagaatgtaaatcaagcgcttaatctcattcagcccaagcatcatgatggcctgctggatgctgtctatcttttttttcagccttgtttgcgatccgtttaaaaaacgcagaatctgatacgataagctgacgtcccgctctatgtattccgtcacgcgctgtatattgggctggtcattgtttaattcgcttaaaagctggtagtaagaatgaaaatgaaacgtcagatcatttccgctgatgacacgcggttcactgaaaaaatatccttgaaacaggtgaaagccgtctatggccgcctgtttataatcttttctcgtctccactttctccgctaaataaatcagacttttacagctgtacgtctgaatgatttttttgcgctccagacgcgaggattgcaaaaagtcgatttttaaaatatcaatatatttcatcagctgttccactaactcttcattttccggattgatggcgtaaaaatcatcaagtgctaatgtatatcctaatttcttcagctgtctgcatcttgagatgagtgccggagtgatcggtatgtcctcaagaatttcgataataagctggtcaggatcaaaggaggtagggagatctgaaaacatcaggctttctgtaaaattcacaaagcagcgtttcccctcagtcagcttttcgattccgatgttgataaagctgttaataatgagatccgtcgtagctttatctccatcagcggccgaataacggttctcttcgctctcccggtaaagaagttcataagcaacaacctgttcgtttctgttgaagataggctgtctcgcaacaaacaccttcattcatttacccccttagatgcggccttcgaacataagtatatcaaataacttgacgaaatttgtctaaatgtgaaaaatattatcacaacaaaaaggcctttccagagaaaggaaaggccgctttgtcttctattcaagttcccgtttcagcttgcttttgatttcatgaatccgctgcatcttgttgctccagcagtcttcgcttaaatcgaccggatattcttccggcttgctgatccgtttgtattcctcccacagaagtttgaggttatcctgcacgtattgctggatgtcggtaatttcgggattatcatagcataaaacgccgttttcaaagatcggctcatgcaagtctttcgcatagaaatcagtgacgaatttgctgacgaacgtgtggacgggatgaaacatttttaagcgtttctgatcatttacccgctcgtcataaagcgcgatataatcaccttccgagtggtgattcagcttgttgataatccggtatactctctttcttcccggcgttgtcactttttcagggtttgacgaaattttaatggtgtcggtcagtttgccgtcctcttcaatggcgacaagcttgtaaaccgcgccgagagccggctgatcgtatgcggtaatcagcttcgtgccgatgccccacgtatcgattttcgctccttgggatttcagatttaatatcgtgtgctcgtcaagatcgcttgaagcaatgacctttgcgtctgtgaaacccgcttcatcaagcatttcacgcgctttttttgacaggtacgccaagtccccgctgtccaggcggatgccgatgaagttgatccggtcgccgaattcctttgcgactttaatcgcattcggcatgcccgaacggatcgtatcgtacgtatctacgagaaacacgcagtctttgtgggtctccgcatatttcttaaatgccgtatattcatcgcggtacgcttgtacgagcgcatgagcgtgcgtgccggataccggtatattaaaacgctttccggctcttacattactcgttgcgctgaagccgccgatcaaagccgctctcgctccccacatggccgcatccatttcatgggcgcgccgcgttccgaattcgagggcgtcttcgtcaccgacaacgcctttaatgcgggccgctttcgtggcgattaatgtttggtaattcacaatgttaagcagagccgtctcaatcagctgggcttcgatcaggggcgcttcgacccgcataatcggttcgttgttaaaaacgagctcgccttctttcatgctgtaaagagatccggtaaaagaaagatcccgtaaatactcaatgaaatcatcagcatagtgcaattccgtttttaaataattcagatcgctgtcggtaaatttgaagttctccaagtattcgattgctttttctaagcccgcaaataccgcatagccgttttcaaagggaagctttctgaaaaaaagctcaaaaatcgcttttttctcatgaatgccgtctctccagtacgtttcggccatattaatttgataaagatctgtatgtaaagacaaactgtcgtctttaaaaccatgctccaccaaaattgttttccccttccttactctgccacttgcgctccgatgctgttcttaaaatgggacagggcccattcatgcccttccggattaaagctggccacagcgttttgatgaatgacaatctgaaagcccttgttgtaggcgtcaaccgccgtgtgaagaacgcagatgtccgtgcacaggcccgcaagatgcagctcagtgatctgccgttcccgcagtttcagctctaaatccgttcccgcaaaagcagaatatctcgttttttccatataatttacgtttttggcgtgtttatgtttctcataaagaggcgatagccttccgtacagctctttgccctccgtgccgttgatattatgcggaggaaacaggcgtgtctcgggatgaaagtcatcgtctgcatcatgcgaatcaaccgcaaagacaacgtaatcaccgttttctataaatgcttgcgtcaaactgacaatcgtatcttcaatctgtctcgcgggttctccgcaggttaatgccccgttctctgctgcaaaatcattcgtataatcaatgcatataaatgcttttttcatagccggcctccccgccattcatatgaaaaccattatatcctatctccacttgtaagtgaattggcattgtaaaatgacaaacggtgttttgcccttttaagatttcaggagtgagcgctgaaaaatgtcatcctgtacgtaaatgccgtcaaggttcacggcataatcggcggcaaaaaccaggccgagcggcgtttcgaattgaagatccgatatgacggagcttcggacaccggcaagtgcggcaagcttcatatatggtgaataagcatgatacggaagccttccgtttatatagagcaccgcgtcttttcggcttttcagcgcctgtttcacttcttcatacggctgcttttgcagcacctgccccttcgtcagggcaatgatgactctttcacgcagcgagcctaaaaataaatggcgttcatccggtttcgtctgcagagggccgtacatcccctgctgtaaataaagatcaaccgttttgtcgctcatcggcctgtccctcctcagcttgttttacaattatctccccggacgggacgcggtaaaccgcttcgttacatttcagccacccaatgggagatcttgccggcgagctctccggcgggttcttcttcaatcagcttgctgaatgattgtaaaagccgctgcgccagcgcctttttctcttcctcataggaaatgatcgtgctccactcaagttccggaacggctacaagggtatgctgttcttttttattttcatgcagatatacatcaccgatcattccggactgcacggtaatattcgcttttctgattttcataaaaaattccccttttataaagactgattctattatactacaaaaaagcgacagcctcctaaaaggaggctgtcacgcgttaaaccaatcaggttcgtcaaacacatcgatgtcttcaaagcgcgttttgctgaatttattagtgactttgacaaaatctccggaatgaaacgcccctgcccccgcgcctgagtggtcaacggctttgggagaaatggcaaacacgtcaccgaagctcgccgcagcgtctccggctaaactcataatataaatcggtcccacaattgcaggcatacccacacctccgcttttctttacagcattttatgcgctgcatcgggagttgtgcccgtttttatttcggcttgcggctgtcttctagctttgaccgctgacgaagtttgataagccggacgatatttaagacgaaagcttttaaaaccgcgtaaaccggcacggccagaatcattgcgagaatgccgccgaaactgcccgctccgataagcagaagaataatggtgagcgggtgggtattcagccgtttcccgatgacaagcggagaaagcaggttcccgtcaagctgctggacgacaacgacaacaataacggcaaacagcgccttagccggcgaatccataaacgcgataatcaccgcgggcgccgccccgagaaacggccccaggtacggaatgatattggtgacagcgatcaccatcccgagaattaacgcatactgcaggccgatgatccaatatccgataaagcatgccgttccgacaaagagacaaatcagcagctgtccttggaaataggcggccaatgtgacatataagtcattaaatattttccgaccttccgcccggtaggaagtaggcaggattttaaccgccaagagcggaaaccgccggccgtccttcagcatataaaacaaaatgaacggaacggtgatcacgacaagcgtgatattcgtaacgacgccgaacactgccgacaggcttgccgtaatattttgcggaaggctttgtaaaaatcccgtcagagactgctggattttttctatcgacacataatcctgcgtcatcatccacgtaaaccatttggaatgggataattgcgccgtcaagacttgaatctgatgaatgtaatcagggaaattgttaatcagccccgtgacctgggaagccacaatcggtccgatggcggtgaacataaaggcaatcaggccgatgaaaacgagataaatgagcaggatcgccaatgtccgggggatttttttctcaagcaggcgtacgatcggattaaaaatgaaaaacaaaatgcccgagatcaaaatcggaaaaaacagcgtggtgataaaaccgaaaaacggctgaaaaataaacgaaactttcgttgatacgtaaataatgagcaaaacgagcaaaatttgcagcgtccaaaaatggacctttgatttcaacaagcggtttcctcctattgtcatgtgaacttgtactgtgattgtaccaaaaaaagccgccgtgcatctatgtatctcaaaaaagaagacgcaccggggttctatagggccgcctccggtttgcgccttattcgtgctgttacacgcgttcggtataatcaggcatgacggaaaccacatggcggtttctgatataaaatacacggtcatgcgtttcttcaatggcgatgtgatccggagtggcatcaatcagccgtcctctgacaatgcgtctgacggtttgaatgataaaccttgagccgataagtttatggatggtctgataaacgtaagggtccactaacgagacgatttgcgggcttccttgatgggccattttcgctgatcccctttactatgttttccttcagcatatgcagcggacaaaggctttgacacagtacgtctatcggagcggaaaaggtgttagtgagcatgcggagttatgtaagcggaaaaggccgcatgagtggcctagactgagcttcttatgggatattgggcttggtcaattaactgatcaagcttttggatttgtttgagcgcggccgtgtgatccatttggcggtaatggtgatgcccgccgggttcttcatcgagttcatctgcttgtttcacgatttgctggagcgtattcttgtccagttcgccttcaggcagataggaatcggtgtgaagcagaatcgccagcgcaatgtccttcgccgcttttggttcttcaccgagccggatgagcagcttatgcgcccgttccgcgcctttaatggcatggatatcgtttcttctgtacttttcataatcccatttgccgtctgtgtaccattcataatggccgacgtcatgcagtaaagccgctttcgccgcaagatccgggctgacacctgcttttacggcaagacgatatgcatgaaacgcgcaggcgatcgcatgggcgacaccggaacgctgtaaatacttttgtgcgattggatgggtgaagacatccattaacgttacatttctcatggaaacccctccttatttatatttttagaatcctaacataaatcgagaagaaactcaattcatctgatacatttcttataccccttatacgttgtttcattcatcatatgccgccggaccccgaagtgattgtacaaacaaaaaagagcagcgtaaaagctgctctacaaaaattctttgatatcgtatatccgtccgttttccggctcacccgcgatcagtgagtgaatgacgccggcgatgtattccgggcttctgaggtttttcgtttctttcagattgcggaaccgttcgatgtcatggaaatcttcttttgacgaagaacggatgacagcctgcatgtctgtatccatcactcccggcgagaatgagatcatgcggaccggcagctcttcatcttcctgttcaaacccgaatgttctcgtaaacatatcaagccccgcttttgagctgcaatacgcgctccatcctttataaggatttttcgccgcgccagatgcgatgttgacaattgttttgctgccgctgaacgcttcgaaacgctttgtgaacatttggctgagcaaaacgggcgccgtcagattaagggtgtagtggcggttcaattcttcggcggaagcctctttcgcccgcttgatcggttccaccatgccggcattattgatcagtgtgacagcggaataccgcttcttctcagcttgatcaagaatcgccttcatctgccgctctgtatctgccagatcggttaaatcaacactgtattctgtcagcccctcgcgcttttccccgcttatcgttcttgaaagcgcggcgacttcggctccttcttgcagcgcttgttccgtcagcgcccggcccaagccttttgacgcgcctgttataagaaaaaactgcatgaaactcctcctttttttcttattttacgggctgtcttcccgcaaacacaagcgatccgtttaccgctttgccttttcctgcgccgtgactttcgggatcaaatagatcatcgccgcaatcccgaggaggatcaagacggcataaatgacaggcagcagataagaagtctttttctcctccgtttccatatctgccgaggtatgccgcaccgcaggctcggcaaatgtgatacccagttttttcgattgcgctttgatcgtattcggctccgtgtctgacgatgtaaacaattttgatatcagtttgtcatccgggttttcggccggctgatcaaaggtaatatccttctgttctttcggaagcgccgttttttcctcggagtaggcatcgtcgtgcaggtaatccgtacgaatttcaatgtctttcttttcatattcattcggcttgacatcagtattttcctcattcgcggctgcggcttggggaaggaaaaggaaaaaggagagagcaaacagcagcaatcctttttccatgaacgtgttacgcctcataagactgatcactttcctccgttttttccgcaaacagccgaatgacgagcggaagcgccgccgcaatcagcgtaatgatcgcaagaaccgttacccccatcgcaaacagatggcccgttccgtattgaatatcgatatagactttcgaaaccggactgtcaaaggtgaagttcggcataatcaggtcgatcaaaggcgccacataaaagagaatgagcgcggatgatgcaatccatccggtgattgagctgaagacaaaggctgcccggataaaagctgaactcgccgcaagcaagagaatcgtaaagactgaccatttaatggtctgatcgtccggaagcgagtagatattcagaccgaacagactgatcatcaatccgaccataatgtttaaaatcccaaagagcgcgcctttgacaagaagcggcgcctgctgataatacgagctgaaatagccgatcagaagactgctgatcaggacgatcaccaaaatgacgaccggcggaacattctgaacccggtcttccggcacctctccgctgattttaagcgggttggcgagataatcgtaaacgtagccgttttcctgtccgtcaacgagcgcgttccctaaaatgccgtacacgtcatttctgatcaatttcgtggaatcgacgtttttgccccagttgctgttcagggtgtccgctttatgctggacgtcatttacgctttgctgcatattgtcggtatagctgatgatgccggactggcgttctgacagatggcccatcgtgtcagacatttgcaggacttcgcggccgacggtatcctgagcgccgagcgccatcgttccggttaatccgtctccgctgaacgcggccgcttcctgcacggcgccttcagccagctgatcggatgctttcgccgcgctgtctgaaatgctggcgagctcatcgagcactccggcttgttcatctctgatatacgagctgtagttatccgagaattcggtcatgcctttaatgaaattgctgatgtcttcatctgtctgcattttattgtttttcagattttcccagcttgccgtttcttccggtttgatggcgagaacggtttggacttcgccttgctgggctttcagcacccggtttttcacatcaggcagcgagcccgcgtcaagagagtgatagagtgtcgcctcatacagggataaatcattatagtaactcattaaatcggatatttcttttgtattgatgtcagcggcaaatatctgttcaagagcagattttcggccgctatccaatgacgggtagttcaaaatgttctgttccgttcttacaatcattctgtaaacggtattgaagtcttgttttctcgtttcttctgattcttccagctttttctttaatttgtctgcgcgttttttgacgtcatcaatctggtccttaaggccttggatttcttcatcaagagcatcgagacgttttttcagttcttcattatgagtctgctgtttctcttccagctctttttcaatttgctgaatgcgctctgcggcttggttcagcctttctttcgtctcagatatgtccgtgccgccgtccccttcagaatcgttcggatcgtccgccggctcatcagcaggcggagtgacgtttttagcggctgtcgcggtctggacggtttttggctcctgatcgcctgtgttatcggaagcaggctgctcttcttttgtgccgtcttccgtttttccgtcttctccgggattcgttccgttatccggatcggtatcgccggagttttcaccgtcatcgccttggcccgggttttccggttccggtttttctttttccggttcttttaatccgtcagaaatgtcattgatttcagcggagatgcgttttaattcgtcacgctgatcgtcaaggtccattttcagatcgccgggtttttcttcttccggtttttcttcttctttcggttcatccgagccgtcatcccccgggtccttttccggaacggttaaagcctgccgatcccttttcataagggtttggatactgttcagtgtttcaaatcttgcttgagctttatattgagtcaaaaaattgttcagtaaattggattgaatatctgccatcccgtgttcctgctcaggaacctgcgcttctctcacctgttgggcggcaagaagagccgatcccgtctggtcaagctgtgtctgcgcccggtttatgcctgaagacagcccgctcatcatcgtgctgaactggttggcggcctgctgtgctttaatggcattcagtccggttgtgatttgcttttggttttgttcctgcgcggccatcagcagttttttctgattttcttgatattgtttatagcgctcgaccgtgtcggcaaagtctttaagcgtggttttggcttcatctgccgaagtcaatttttcttttgccgcgccctgcgcttcattcattgattttttcagttcgtcaatcaggtctttttgccgtttgatttcacctgccaagtcattggagctcggcttgtaaaagttatacatgacgttttgaaactctgattctttattgacgatcttgtcaaaatcgcctcggacattgttcactttttgcgagacgaaattccaatataatgccgacatttttttattcattgatttttgggcgtcttctagctcacgctgcaccttttctttgttgacggcgttcaggttgctttgaatattgaatgtcagcgtggctttttgcggacgctccttgtcatagcttaagatatcttttgaaaaatcggatggaatgtaaacgacggcgtcatacttcttagccgccagaccgttttcagccgcgctcctgttgacaaccgtccatgaataatccggacggccgccgagagcggccgctacttctttgccgaaatggacggattcctcttcctcattttcatctgtttgtaagcccatgtcttcattcacaactgcgatttggcgggtggcgttgattttttgttttcccgggtcatcgccgataaaccggaaaaacagcaccggcagcagcagaatgatgacgaccgcggctattaatttgatcaggctttttcgttgttcagtcatctgacggcctccctttccgctgaacataaaggtatttggattttttgctccttcccgttttcaaccaaatagccgaagcccggctgaatgtccggttcctgcctttggtaaggcagcggaatgacattttgttcggattttttcacaagcagcatcgcgtggcggatctgtttcatttccgtcgttaaggaatcatagccttttgagaattcgctgtgattgcccgccgggataaaactgaagcccacatgcgcgtaagatttcataaacatcgccagtttgtcctgaatggcggtgtcgatcgtctgctggaatcttgtaatgccgtcggccattaacacgaccggagagaaactgagtttgtggacatcgccatttttgacggcctgcgcatactgagcttcgcgctccgtgaaaatagcttctgccgtttcgatccactgccggacgtcttcttttgtgtccagatagctgacttttgtttcctgcgcatactgcgacagtccgcggtcaatcgagtcaaacagcccgacccgttccgtaccttcacgcagcaggtgattcagcatcactttcaggatgtttgtttttccccgctgtgtctggcctaagataaggcaatgcttatttttgcccagatcaaagtacacagggctgaccttttcctcatgaagcccgacaggaatgcggaacggttcttgatccgggccgagacggagtgaaaattcgccggccgtcagcctatccggaagcatcggaatcgggtctgggccggctgttcctgcgtggcgctcagctaatgctttgacatcggctttcagcgcctggaacatctcgaggtcattttccgcttcagccggaagaaacatttgcgcgaaatacagttcttctttttggatcatgacgcggcccgggatcggttcgagactgaacggcggacgcccgtaaatggagtatccttctgactgatccattaaataatggacgactttcgtttttatgttgtttaacagcggctggcggacggcgtttaccctcgttgcagtcagcaggaagtaaatgcctaagctttgcccgtcgcgtgaaatctggataaattccgtttctaattcatgcatttcatctttgacaatgtcgaaattgtcaattgtgataaatataaacggcagctcttcttcactgagcgaattgtacattttgatatggctgacttctttttctctgaacagccgtttccgccgctcgatttcttccttgatgcggatcatgaatttttcgatctttctcatttgatccattaagaaatagtctgcggtgtgcggaagctttgccaatggcagaagcgtgccgtttccgaaatcaaagatgtacatatgaagctcttccggcgtgtatccttccgcgaagttcatcaggaaggtgatggcagccactgacttgccgtagccggatgagccgaaaatgccgatgttgccgtcatccatcatcgtataagcgagaggcgcctgtctttgctgatcaggctcatcaacgcaggcgatgaagaagcggtctttttcctgcgcagggtaaagcgtgcgcgggatacgttcggcaagcggcggaagccacgggctcggcagcttttcaatgcccatttcattttgaatccgctcgatttcttcgactacggcttctatttctgccggggcgtcttttttcgccgcatcatccgcgtccacctcagacagcggaattaagccggtgtcggtaacgatggcaatgtcatcctcggtgccgtatacatcttccatgtaaggggcgccgctccaagcagactggaactgctcatacacttcgttatttccgacttgcaagtagccgcgtccggtgaccgtaatattcgccgcatcactgtttttcaggatttctttactgtcacttgcatcctgcactttcagcgcgaccttaaagcgtgagttgctccatatttggtcgtcaatgatgccgcccggcttttgcgtggcgagaattaaatgcacaccaaggctccgtccgatgcgggccgcgctgacaagctccctgataaagtcaggctcttcgcttttcagctcggcgaattcatctgaaatcaaaaacaggtgcggcatcggaatctccgtttctccctgtttatacagctttgtatagtcattgatgtgattgacgcgatattgatcaaacagacgctgccgttttttcagctcgctcttaatggatgcaagcgccctgatactgaagtttctgcttccttcaatattcgtgatggttccgagaaggtgcggcatcttgcggaacggctgggccattcctccgcccttatagtcaatcagcaaaaacgccgcttcatgcgggtggaaatgaacggccaatgacaggatgtacgtttgcagaaattcacttttcccggagccggtcgttcccgccagcaatccgtgcggcccgtgcgctttttcatgcaggtttaaatagacgatgtcgtcttttcctttatagccgatcggaacagccagcgattttgcagactcacttgtctcccacttctgtctgatgccgatttcttttacttccttcgcatgaaacagctccagaaatgagaccgtttcaggaatggaattcgtcattccgacctgatggtgcaatgtccgaagcgtccgggaaaaccgctcgttgtttgtccgttcgtgcctgtccagcttaaacgggatctgcaccgcttttttctgctgaatgagaatgtctccctcatcttcattaatgtagcggacgagggtgtgaatgttttccgccaggctttccttcgtttccgcggcgatgattgccgagatgccgagatgctcatgccggccttcgatgtattctaaaatgacgtgctctgcgatcagctgctgatttgtgatgacaaagacaaaatgcggctggaagatcttcttttctttatcttcttccaaatcccgctcccgcagcagctcgtaaatggacgataacaattgatcgcgggtctgttcattgtaaataaatcctttcgcgtacatatgaggcagctgaaattgcggcagccacttcatccattcccattccttatattcgtcctcatgaaagataaagacaaatcgcaggtcatggtagctgttgaagaacgcgagctggccgatcagctggtgaatttcatttttgacgatctggggtttcccgacaagccccatcggcccttcttgtaaatcaacggtcacgggcgcatggcggatatctttatacacacgctgcatgtgctgcgactgctccatcaagtcatccacatcacggttcgcaaggtctccgccgctcattgaaatctcgtagcttgccgggaccgtgcccgttccgagccgaagcatcagaaaatccctgctttccagcgatttctcccaaatgcggccgctgatttcagaagttaaatatttcattttttcaaacgggggaaaatgatgcgtcagcacttgcagctgtttttccgacagcgtctgaagctctttccgtttgttttctaaatactgcttgtacacacgctcccgtttttcctcccgttttttccgctggtttttttcacggaaatactgcacggtggaggtaatgagagtcatcataaacatcgccaaagagacaaggatgaatatgcccctcggctgtataatggcgacaacccccattacaatcagcatgaccaaaggaggcagaatgacgagccacagcccccggttattctgttcgctttcctgcgagggaaagctgaatgaaacgcggtcttctggaagatcgtagaccatacgcggcgttcttcgatattgcgggtatttctttttcatttcggtgcttggttttaccgttttggttaaaccggtttgaagcttttcgtgatgaacgacttctaaaaggtcgtcctccgtcagcctcacacgcagaaaattccacagcagctcatctcccgtgcggagcctttcgggagcttctgcaagttttccgttcacataaacgtcctggccatcagggacgacagaccagcatcctcccgactttcgcagataaaaagcccctgtttgagcggaggacggctctttgtatatatctgcttcctctgtttctgatgagaaaacgatctcatccttcccgccgataaaataaacggaggattcttctttgtcaggggtgagcagaagccgcatcgtctcttcttcaatccgacagggcatttcatttcctattgtcaattcgccggcacagttatttcccaggaaaacatcataacgatctgtttcttttcgataaagggttgcggcgttttgccgtaacggaagtgtgccgaccgtgattgtatctttcatatccggaccgatcgtaatcggctgagacggcgggagttcagacagctgaatcttttgtacgtgctctcggtaaaagacccataacagactcatatggcgaacctcctgacagcctgatcgttacctgcggccatttgatgtgtgctgttattttttttcatcttttttctcatctttcttgtcgttctctttgttatctttcgctttgtcttgtttgctttcatcctgtccggcggaagcttcggcggtgtcaccgttttcctccgcttctttatgctgctcctccgcctcttttttcgccttcgcaagctcgctttccacggcgtccagttctttctgcttttcgtcgtctttcatactgtcatccgctaataattgctgtttatattttgtaagtccgagccagatgtacgggttgtactcaagattgcggccgattttgatggcttcttcattttcccctctgccgatatcaatccaataaaggaaatgcttcgggtctgattgcagcgtgaccagattcccgatgtttttccgctgctcttccctcagattttcaactgccacataagaggaagcaagctcgtactgcacagattccgggaggctttccgcatcgtatttggcgagtgtgtcaatgactttgctgtactgctgatttaaaaaatagcggttgctttccgtaattgcctcttgcttcggctgggcgaaaaacagaacgtataaggagtaaagaagtgccggcacaaggaggacggcaagcgccagaccggcgtatctttggattttccatttctttttcggcagttttatgtatgtcttgtccctttcttcgagggaatcaattgcggtttgaatggtttcttccagttcttcaatcgtctccgcctctagcacgcttttcacctcaggagagaagtgaagcgtctccttgtacttcaaatattcatcgaaggtgtacgccccgtcagctgcaagcgccgcacaggctttgagctcgtttaacaccctttctctatcttcctcataaggcggaaggctctcctttacgccgtaatgaagaaagtaaggcgtcagcgctttatcaaacacgatattttcaggggcggcaatcagattgagacgtttcagcttatgctgtttcacggcttggacgagacggtaggcaaattgccacctgctttttttatcttttccttttatatagcggaaagcctgataagaagaaggaggtttgattgtgatggttacttcgtcttctgaaactgagacctctttttgaaaaaaaggatcagcatctttaatcacgtttgcttccagcccgtcaagaagcttgattttttcccgctggaaggtgaacgtgaagcctgattcggtttcttcccggacggcgtctaattctgtttctaaataagatctgttatgacctgtcattccaccatgtcctttcataaaatttcaaggcggtctccgttcgtaatgccgcagtcagatagcttttgttctccggaaaaaaccgcttctttattgaccactctgatccaatagccttcacgcggcggaacggatacatgctgagcctgccgggcaatatcaatgacttttttcacagaatggtaatctgacaatctgagatcgaagacgctgccgttataatgtgttaaatctattgtaatatcgatatacatattcatatcacccttacatagaaagagcgccgtcttcttgattgaatcaggcgctccgtttcttcattcatcttattatccgcgaatttggttagcgatatcttggtcagtagactcaagcgtatttgccgtttgatcgagctgatgattcacatcttgaagcaattcagacattttaataaatgaaggtttcagctgctcatattgatctgcaaatgcttcacttgaagcaccttcccacatgcttttcaaatcagaaatcatgcggttcaggcggtcaacctgattcatgacttcctgactttcaacgccatattgcttagccatcgctcttagctcttcgggtgtgacacgaattaatccagacatattccttataccctcctgtgtcatcagcctaaatatgggctaattcacttattttttgaacgtcattattataaaaacaaccattcggcacagtcaaacaaatctgttttaattttacaaaatgagtcttatgatatattggatttttcgtcacatttacacattttgtaaatgtagtagtatgattttcttattattttcgttttcatcgaatgatcttattgtcctagtctatttccctgcaaagatgcctttcagtctgaaaagcaagatggtaagatcaagatatgaagctatgaaaaagtagggatacagatgaccaatccaaaggatccatttaagtacagtttcgacaggcttgaagatgttgccgatcatatcagtgaagttcttcaatgccccattacaatagaagacgttaatcataaactgcttgcatacagcacgcacagcgattgtacagatccggcccggacgtcgacgattatcgggcggagggtgccggaaaaagtcatcaacaaactctggaaagacggaaccattccggcccttttaaaaacggaccagccgatcaaagtgaaagaaattgacgaggtgggcctgagcaaccgcgtggcgatttccatctggaaaaacagtcaggttctcggatttatttgggcgcttgaaatcaaaaaaaagcttaatgatgaggatctgaagacacttcagctggcagccaaagcggtgcggaacaagcttttgcacctgcagatccgcaaaacgaaaatcgaagagcggggccaggagtttttttggaaaatgctgaccggccatatttatcaggaagccgaaatggccgaagggtttcataagctcgggatggcgctgccgtccgtgttcagcgtcatgatcatccgtttacatgatgagctgactgaaaagacggaacagcagctgcaatatttgcaggaaacgacacagcagattcatgtcatgctggcgactgtcgattcaaatgaattaatcttattagccgcgccgaaaaccgatcagccttttaaagatgtaaagcacttcgcccttcatattcaaaaacagctgaaggaacgatataaaattgaggatgcgtcgattgcggtcggcggtatttacgaatcgatttcttatgtttaccgctcctatcaggaagcgctttccgtattaaaagcgaaagagcggtttgtgagagaaaccaaacaccttttcagcttttcggaactcggcatttatcagtacctggatgtgttggatgaaaaacgcaagcacagcggctatatgaactattccctctcaaagcttgagcagtatgacagggagcaccaagccgatatggtaaaaacgctcgaacattttattgatgccgacagcaacgtcaacaccgccgctaaagcgcttaacatccatgtcaatacattgaattacaggctgaaaagaatcagccagatcgcagaaatcgacttaaaaaatgtgaatgaaaagtttacgatttaccttgatatcaaacttcgcagcatgggttcgtgaaatttcacaaatccgtgtttttttattttctgtttcaaacaaagaattttcgcaaaaatcgcgctacacttgaaacatcacacaaacattgggggaaacagacatgattatcggggttccaaaggaaatcaaaaacaatgaaaatcgagtggctttaacacctggaggcgtttcacagcttatcggaaacggccatcgggttcttgtggaatccggagcgggactcggaagcggctttacaaatgaagattatgtatcagcaggggcggaaattctggaggacagaaagcaagtatgggatgcggaaatggtcatgaaggtaaaagaaccgctggctgaagagtatgcgtatttccgtcaaggtctggtcttattcacttaccttcatttagctgcagagccggaattagctaaagcgcttacagaaaaaggcgtgacagctatcgcgtacgaaacggtaacggacggacgttcccttccgctgcttacgccgatgtccgaagtggccggcagaatggccgcgcagatcggggctcagtttcttgaaaaaccaaagggcggaaaaggaattttattagccggcgtaccgggtgtatcccgcggaaaagtcacgatcatcggagggggcggcgtcggaacaaatgccgcgaaaatggctgtcggactcggtgccgatgtgacaatgatcgatttgaacgcagaccgactgcgtcagcttgatgatattttcgggcatcagattaaaacattgatgtcaaaccctgtaaatattgcagattccgtcgcggaagcggatcttctgatctgcgccgtgctcatcccgggagccaaagcgccgactctcgttacggaagaaatggttaaacaaatgaaaccgggttccgtcattgttgatgttgccatcgatcagggcggcattgtggaaaccgttgatcatattacaacccacgataatccgacttacgaaaaacacggcgtcgttcactacgctgtcgccaatatgccgggcgccgtaccgcgtacgtctacgctcgcattaacgaatgtaaccgttccttacgcgcttcaaatcgccaataaaggcgcggcacaagccattgcagacagccctgcgcttaaagcgggcttaaatacggctaacggacatgtcacgtatgaagcggtagccaaagacttaggctatgactacgtgcctgctgaaaaagcaatgcaaggttcggctgcaaaagcttaatagatatgaagaggacagcctgatcagcgggctgtccttttttctttctcataaaaggaaaaacggccccctgtctcgaatatcaattcatatcccggaagaaaaaggaggattcatatggctgttcagcactatggtgtattaaaaggcactgtgtcagatatgaaaagggaaacagatgatgattctccgcattttcaagtcgaggtgctaggcgagcctgatacgcgctatcgctgtgcgatcaatgtcatgtcaagttcaaaagaatcagaggttctgtatgcggcacgcgatcattttgacgcaagcgcgatcaccctgctgcccaacattccgtatggatataccccaattgatgaaaccagccgtgagctggcgctggattatgtccgcggcggattgtttgatccccggaacatggtgcccctcccgcatgaagtcaccggtccggataatgacttaaatgactttattgagacgtacatgcaaaaagcgaaatcagaaaaagccaccgtctatatttacggctctaaattcgggccggagccgggcgctgataagattttcgggttcaagccgacaaacggcatgcataatattcatatgaatcagggaaacccaattgatacacgctggaagaaggataacggaacgtggcacgacggcggtattttaatccagtttgcagaccagtgggccgcggtatttttggcttttctgtctcagtcgtggtgcacggatgaagaaggccacccttatacattttgtgatcatacacagcttaacggctgatgtccgcataaaaagcctgccgaaataacggcaggcttttcttattacattttagcggcttcggcctgtttcaggctttccggcctcatatcacgccagtttgtttcaatatattcgagacaaacggggcgggtttcattcgtgaggcgggtttcccagccgtccggcacatccagataggccggccacagtgagtactggccttcagcattgacgagcacgtggtatgagccgtcttcccgttcaaatggatttgtcatatcatctctttcctttctttaccggacggtacgccgtccgtttaatttctctgccagaatcgcgccgatgtcggcaagcgggcccggctggcacatatctttatggcggcagtctaagtcataccgctcgattttccctgtaatatacggtttccaagtatccggctcaatcgggtcaaaccactccggaataatcgtggatctgaagaacagcacatctccgtggaacggcttcggcttgtatgttcctaacagcccgacagaattaacgtacgtgtctttcagattcatcatcactgactcgtccagactggctaatgcgcttccctcacggcggagaatggtcagcgcggtgtcaaaatcaagcggctgatccccgaggctgtccgggtcgtaccctcccagggcaagcagcgcgatgacggcttcctcgtcatcaggcgcattttttatcggcagaaaatgattcggatacgcgtcaagcatcaccaaaagcgaaacctcttcaccccggctctgtaattgtgtcgccatggcctgaatgacattccctccgagagaccagccgagcagacggtacggccctttcggctgcacggtgcggattttttcaatataatccgccgccatgtcatctaagctttgcggaagcggttctttttttccgatgcctctcgcctgtaagccgtatatcggataatcagcctctaaagaagacatcagcccggcataacaccagctgagaccgccggccggatggacacagaacaacggtgtttcttctcctgccgttctgagcggaagaagaacatcaagcgcgcttgcgcccgttcctgactcaagtctttcagcaaggcttgccaccgtaggagcttcaaataatgttccgatactcagctcggctcccatcgcttcccgaatacggctcattaaatgaaccgcaagcaaagaatggccgcctaaatcaaagaatctgtcatcaataccgacacgcggcaggtgaagcacctctgcgaacagctcacacagcatttcttcctgcggcgttctcggtccccggccggtgacctccgtttggaagtcaggcgcagggagcgcttttcggtcaagctttccattcggtgtcagcggcagttcattcatttggacaaaagctgacggaaccatgtaatccggcaggctttcttcggcaaaccggcgcatgtttcccgtgtccaaggtgctgccggcagatcggacaaggtaggcggccagccgtttatctcccggccggtcttcacggacgactacggcggcatcctcgatatccggatgtttgacgagaaccgcttcgatttctcccaattcaatccggaatccgcggattttaatctggtggtccgccctgcccatataatcaagagaaccgtccgtccgcacacgggctaaatcccccgtccggtacattctcgttcccggcgggccgtacggatcagccacaaagcgttcggcggtcaggctttgccgccctaagtaaccgcgtgccacgcctcctccggccacatacatttcgcccgtgatgcccgggggcacaggctccagccggtcatcaagcacatatacgttcagatcaggaatgccgcagccgatgaggctgtttgctctcagctcggcaatgtttttgtctaattcaaggtaactgacgtgcaccgtcgtttccgtaatgccgtacatattcacgagcaccggctgattgtctgcgtggcggctgtaccaatcctcaagccggctcagctcaagcgcctcgccgccgaagatgatatatctgagtgcgagctgacgccccagctctttgtgttctttttccgcatgcatcagctggtaaaacgctgacggcgtttggttaagcacggttacccgctctttcacgaggagatgtaaaaacgcttccggcgatctgctgatgtcatgcggcacgacgacgagacgtccgccgtgaagcagcggcccccacatttcccagacagagaaatcgaaagcgtaggagtgaaacatcgtccatacatcatcagaatgaaagtgataccaatgccgcgtcgactcaaacagccggataacattgctgtgcggaatgatgacacctttcggcacacctgttgatcccgacgtgtaaatgacgtaggccgggtgaagcggtgacagcggccgaatccggtcagcgtccgcagggttcgtgacggcatattgccgaagtgtttctttattctgcgggtcatccaagatgaaggccggcatgccgctttcgatagagagcttacttgcgccttcacggttggtaagcataaatacgggcttggcatcatgtaacataaaagcaatgcggtccgcgggataatcaggatcaagcggcagatacgctgcccccgtcttcaggacggctaacagcccgacaatcatatctaaagaacgcggcagcgccagtgcgacaaactgctccgggccgacgccgcgggcaatcatcatgtgcgcgagctgattggctctttcattcagctctttataagtgagtccgctctctccaaatactgccgccgtttcatccgattttgcggcggcttgtatttcaaacagttcaggcagtgtctgccgaggctgaatatgctgttttgcccgtttaaccggcaaaagcttccggcgctcttcatcagaaagaatggttaagcttccgatcggtttttccggatgtgatgcggcatcttcgagcagaagaagcaggcgtccggcaagtgcttcagccgtttcttttctaaataagtccgtactgaactccagcaggccttcaataccggcaggcgtgccgtcgtcatggcgctgttcagccaattccagcgtcaaatcaaatttggacgatccgacactgctgatttgcaggcttgtttccatatcaggaagactgagtacagggtcaggcgtattttggaatgcgagcatcacttggaacagcggatgtcttgaccgggaacgaaccggattcaattcttccacgagacgttcaaacggcacgtcctgatgttcatatgctgcgagattcatttccctgaccctttcaagaagctcacaaaagctcggatcgccagaggtatcggttctcagtacgagtgtattaatgaacatacccacaaggtctcccaatgcgtcatcactgcggccggctatcggactgccgatcggaatatcggtccctgcaccgagccgggtcagtaacgcggaaagccctgattgaagcaccataaacaggcttacgcgctgatttctggcaagtgagagaagacgggcatgaagctcttggccgatgttgaccggaatgacgccgcccctgtagcttgattcagcgggacgcggaaagtcagacggcagctccagctgatccggtacattttcaagcgttttcttccagaaatccagctggcgcgcaattaagctctcagaatcagacgcgctgcctaaaagctgctgctgccaaagcgcataatccgcatattgaaccgccagcggcgcccattctgctttttcacctgtttgccgggcgatataggctacggataagtcacgcatgagcggattcaaggaccagccgtcacctgcaatgtgatgcaggagaatcatcagcgtatactcgccgtcaccaagatcaaacagctcggctcggacggccggctctttagcgagatcaaaccgatatcgtgccgcagcggcaagcatgtcttggagctcgtttttgtctgcacgtgtcactgtaaacacagggcgggcttcttcagcagataaaatgagctgatgagatgatcccttattttccggaaaaacggtgcgcaggctttcatgacggctgacaacatcgtaaaaggcgtgtttcagcgctgattggtcaagcttgcctgacatgcggacaatcaccggaatgttgtaagtcgggcttggcccttcaagacagtagagaaaccatagacgcagctgcgcaaatgacagcgggatatgctccggccggtcaaacggcttgagcttaggccgcgcactctttgcggtatcaagctgtgcggcgagcccggcaacggtcggcgtatcaaacagacggccgatgccaagctctgcgcccatcgtctcccggacccggctcatcaggcgtccggctaagagcgaatgtccgcccaattcaaagaacccgtcatcaattccgacccgtgcaagaccgagaacctcggcaaacagatcgcataatatttcttcctgcggcgtccgcggccctctgtcagacaagacagcggaaaaatcaggtgcaggcagagcgctgcgatcgagcttcttattcggtgtcagcggcaattcttccagctgtacaaacgcgcccggcaccatataatccggcaggctttcgcccatatattcacgaagtccgccgatatcaaggggctgatccgcgacagcataagccaccagccgcttatctccgggctggtcttcacggacaatgacggcggcctgcgaaatacccggatatttcgacagcactgactcaatttctcctaattctatccggaacccgcggattttaatttggtgatcggctctgctgatataatcaagcgagccgtcctcacgccagcgcacgagatctcccgtccgatacatcctcgcgcccgggggcccgtacggatcggcaatgaatctttccgctgttaaatcaggacggttataataacctctggcaagcccctcccccgctatataaagctcgcccgcgattcccggcgggacgggctgcaatgcggcgtccagcacatatacccgcgtgttccaaatcggctttccgatcggaggcgcccctgtatggccttttgcaagcggctgtgcggccgaccagattgttgtttcagtcggcccgtacagattcgtcaccgtacagcctgattcaagcagagcatgcataagcgcgttcggaagcgcctcacctccgacaagcacctgcagcgcccggagagaatccggttcattggtgactaatgaatgccacaatgtcggcgttgcctgcatgattgaaataccgtatgagtgaatcatgcgcgcatgcgcccgcggttcctgaatcgtctctttacgtgcgatgacgcaccccgccccgctgatgagcggaaggaagagctcaagtccggaaatatcaaacgccgcagtcgtaacggcaagcaggcggtcttgttcgtcgagcgtaaacatttcccgcatggataagaggaaattgcttacgctttttaatgtgacgactacgcctttcggtttgcccgttgagcccgatgtataaatgatataagcggggtgcaaaggcgaacattccgcctgagcgggaaagtcagcattttgagcggcaacggtttttaccgtatccgggtcatcgagaatgatcctttttgcatcactgtcttccggcatgcggccggataattccatcgttgtaatcaggcatgcaggctgtgcatctttgagcatgtatgtgatccgctcagaaggaaaatcaggatcaagcggcaggtatgcggctcccgttttcaaaacggccagcatgctcacggccaactcctgtgaccgcggaagcagcaaagcggcaaattgttccggtccgagccccttttcctttagcatgccggcaagctggttcgcgcgcttgttcaattcggcatagctgagctcttcgttttcggtgatgattgccggccggtccggtgtttttacggcctgttcgtaaaacagctccggcagacttttctgcttctcggccttgcgcgtgtcattccagctttccagtacgcggagacgttcactttcaagcagaaggttgagtgtgccgattttttgtgtctggtctttcacagctgattccaacagaagcaggaatcgtttttgatggttttcaatatcttcggcgctgtatacttccggattcgcatcaaagtccacacgcattccgcttccgtccgctctgtcgtaaacgttaattgacaaatcatcaacgggccctgctgataagttatgaacggtcccccgcgctccggcgaaatcaagcgcgtagtcaaacggcatcacattgacttgcgggccgaacagcctgcgattttctccgagcaatttaaggtcgcggcgcatgtcttcatggcggtatttctgatggcgccggatgtttcggatttcttttgccacttggctgacggcctcatgaaaattcatatccgggcggagagaaagccgtaaaggcagaagattcatgaccatactcggaatattcagtgaaattgagccgatccgccccatcatcggtaaaccgagcacgatatcccctgcgtttgtcatccgatggacatataccgccgctgcggccgtgacgacttcatgccagttcggaatcgcttttacatgctgtaaagccgtttcagaaagataagccgtgcttctccgaaaacgtgttgacgttcgcggcgctctttctgccaaactgacgacatcaggttcatccgcaaatttctccatccaaaattcccgatctttcaggaattgatcagacgcgcggtattcttgctcttcttttaccagatcctccaaagaaccgaaggagcgcccgttatccggacgtccttcccgtattgcggtgtacatttgcgccgtacgccgtgccagcagtgaaaaaccgtagccgtctatcgcaatgtggtgaatgcgctgataccagaaaaagcgttccggtcccgcctgaaataaaatgtcgcggaacaaaggcccggccgccatatcaacgggctcagccaaatctgtctgcatgagtctgagtgcggcctgcttcggatcagcttctgaactcacatctatgacatcgatcgcagcttcaaatggaggattgatgatctgcttcggcccgtctgccccctcctcgaagcgggcgtgtaatgacgcggcttccgtcagcacgcgttcgagagcggttttaaatatggtcacatcgatcgcgccgtttatctcaacgtactcgcctgtattgtaaatcggattatcaggatcaagctgctgcgcaaaccagataccggcctgtgcgcctgtcagaggcagctgttgtgtatcatgcattctattctctccctttataaataatctgcgttcggcaagaatttttgagatcgggaagaaagaagtctccaccactcttccagcgtcgggttctccgccagttccacaaacgtcacttcagctccgtcacggcgccattgttccacaaggctcatgattctgacggagtcaagacctctgtccagcaggtcttcatgatccggaatatcagacggtgattcttgaagaatcgccgcaatttgttcacgcacccggtcttttgtcaatacggcggaagtcttctcttctccttcagaaaccggcgcgccgcccagcagctccagcacttcgtttgtcaaagccgtgtaagcgcagcgctgagacgcatattcgatggccatcttatgtttttctgaagaaaaatcagcaacggcgtctccgataaagaagctttggatatcatccataaatgcttcacaggctgtgacgagacagccgatgtgtgcataaattcccgtaatcatgagctggtctctgccgctttcacgcatgatctcaatgagattcgtccgtttaaacgcgctgtatctccactttgtgaggacaatgtcctgatcatccggtgcaagctccggaatgatcttttcttcataaggtccgctttttagccccggcccccaaaaatccgtcagcagcgcacggtccgccgggtcttggctgcccggctgcgcggtatacaccaccggaatgccgagtgctttgcattgctcttttatttttttgatattctcagccgcctccgtgatcggagcttcacctttcgcaaaagcatcgacgaaataattctgcatgtcatggatcagaagcaccgcgcgtttcggattcagcgtccacgatactttattttcaggcatatctgacgctgtcggcagcgcatatgcgggaatagacggtatagccaatgtaaacacttccttttttaagattgtttgatttcagccggctttactttttgggcgatcgtttcgcgaagatcctttttactgaccttgccgacgccggttttcggaaaagaagcgataaattcaatccggtcggggattttatatgccgccagtccgcgctcacgcaaaaatgctttcagctctcccggtttcggcgcttctcctttcgggatgacgaacacacaggaacgctccccgagaaaatcatccggcattgaaaccatggcggcatcatgaacggcaggatgcgcaagaaggtgattttccacctcctcagcggctattttttcaccgccccggttgatttgatctttcgcacgtccttcgacgatgatatagccgtccgccgtcagtttgacgatatcgccggtctgataaaatccgtcggctgtgaatgatctttcattatgttcaggcgctttataatatccgcgaatcgtgtaagggccgcgtgtaaacaaatgtcccgcttcaccgggggcgacatcccgcccgtcatcgtctaaaacccttacctcatcaaaaggtgacatcggtctgccttgcgtattgacaatgatctcttcaggatcatccagtctcgtataattcaccaatccttccgccattccgaaaacctgctgaagggtgcatccgaaagcgctcttcacgcggcgggccgcctcagcgctgaatttggcgcctcccacctgcagcacttgaaggcttgataaatcatcacttcgcgaaccggatgcgtccatccacaccatcgcaagcggcgggacgagcgctgtaatcgtgacacgttctttttcaattaacgggaagcagtcatccggactcggcgtcggtgacagaacaacccggcccccggcatataaagttcccagcacacccggcgagctgagcggataattatgcgctgtcggcagagcggccaaataaacgctgtgatgatccaagccgcatatttccgcactgatgcgcaaactgtatatgtaatcgtcgtgtgttcgcggaatcagcttggacagccccgtactgcctcctgatagctgtaaaaaggcgacttccgccgggcttatatcttccagctgaacaggctctctatgcaggctgctcagttcctgaaactcttcagcttcgccggccacaatgacatgcgccaaatccggaagtttgcctttcacctgtctggcaagcgccctgtaatcaaaacctgaatgtatatcaggaatgatgtatgctttcgcctctgcaaactcgcagaaatacgtaatctcactgcttctatgagaaggcagcgcgaaaacgggcagcgctcccagccggaacagcgcgaaaatcacttcaaaaaactcagcgatattcggcagctgaacgacaacgcggtcttccttttgaattccgagcttatgcagccccgccgctaaacgatctgccctttcatctaattctttgtaggtccaatgtacatctttacacgtcacggcagtttgatttccgtataaagccgcgcgctctttcagcattcctccgaacgtctcacccttccagcagccgtcttttcggtatttgtcagcccattcttccggccatggcgtaaatccagtcagcacgatccgttccctccttttttacaactcatcttggtaaagccccatcgcccggagcatggtgcggaatttggccgaggtctcgtccagttcatcctgcggctttgatccggcgacaatcccggcacccgcaaagagccggagagaccttgtttccgcttcggcgcagcggagtgcgataatccattctccgtcaccctcagcatcacaccagcccgccattcccgtgtagaaattgcggtcaaacggctcaatatcctgaatcgcttctctcgccgcatccgtcggcgttccgcataccgcgggcgtcggatgcagggcgatggccagctcaagcgatgtcgttgacggatcacgcagctctccctttacctcggtggacaggtgccacatcgcctcagttttaatgagtgacggtttttccggcacatcaagcacacggcagaacggtttaagggcggcggccacggcggccacgactacggcatgttcatgcagatcttttgctgattgcagcagttcttccgctcttctctgatcctcggcaggatcggtgctgcgaggtctggaacctgccagcggattggacagaatcgatgttccgtttttggacagcagcagttcaggacttgcgccgaaaagcgtttttcttgtttctgacgttcccgtcacatccgcagcgaatgtatagccgcgcgggttgtgctgcgccaaatgcttgacggcctgtggaatgtcgatatccttttcagcggtcagatgaagcgtccttgacagcacgattttgctgagcggaccgtccgtaatgttgaatacgccttgttcaacaccgctcataaagccctcaggctccggaacgggacggatgtcatatgtattggattgcggcttttctgcggaagattccgcaaacgaaagcgggcctgccgtatggacattcttcggtacaaaaagccgggaagcttttctgccgtcaaaaggaatggcgccggccgcaatcggatgtttgatgccggcttgctttgcctcaagaagcgtctgtctcacgcgttcaggcagtgaacccagctgattttccgcgtctgtatcaggcacttccgcaaacattccttccgcaagcatcgtacttttcggggaagctaaaaagaacgccccgggcttgtaagcatccagcacctcttttgcagacacttccgccaataaatattgatttgtcatgtttgtccctccttctcgttacatcaaacgcctaaagtagcgccgccatcaacgcataaatcatgcatcgtaatatggtttgcctgttcagaagccagaaacaaaacggcatttgcaatatcagaaggcttcgccagcttttgaagcggaattcccgttttatatgtatcaagcgaacctctgatgacgtcccgggctccgttctcgtcctgccacagcgcccgctgcatgtcggtttccgttgaacccggagatacgatgttgcagcggatatgatgggccgcaagctccagtccgaggcatttcgtaaacatgacggcagccgcttttgacgccgcataagccgccatggaagcacgcggaacgccggctgcattcgaaccgaccgtaacgatggcgcccttttgacgctcaatcatgtaccggcttactgcccgcgacacatgaaatacgccggtcgtattaactgaaaatgtttgaccccaatcttcatcactgagggattgcaccggacccggccgcagcacgcccgcaacgttcgccaatatttcaataggccccatgtcgcgttcaacggcagcgatgatatcattgacagccgcactgtcagatacatctgcggcaaacccctgcgcctgcacgccttttttccgaagtctgtcagtaagcccgagaagcaggtcttcatttgtatctatagctgccacatttacgccttgttcagcaagggcaagcgctgttgcttctccgatgccttgagcggcgccggtgacaacggccgttttccctttcattcccaatgcgtccatattatcattccctttctatattgataatgattatcattatcaactatgattcaagacaatcatatccaaatcaaaacacgcagtcaattagaaaattaggatcagccgcatttagttcgaagggcctgttttttctcatgcgggagaatacggggtatgcggtcctcccggattcaggcagaaacgcagggccctgctgattaaaacgggcaggacagaaatatggccctctccttcaaactcgctgtattcagcacggactccatcatcttcaaatccggataataaagagtacagcgcctctgcgtgctgcgggattctgcttttatgtgttttttcaatttctcccgcagccagcaatacgctgacttgaagattttccgcagagagccggtctgacaaacgttccgctttttgctgaataaaacgcttgttccagtgaattgacggactcccggcaacataggtctggaacatgtccggcctcgtcaaaagcacttgcagcacaaaaagaccgcccagcgaatggccgaaaatcgtctgcctgcctctgtcgatcggataatcccgctccatcgcgggctttacttcttcttctataaaactcagaaacgcttccgcccctccctgttcgggccatgccgcgccgcgcggatgcaccggcagttctgattcagaaagcggcatcgtaaaatcactgtgacgttcggcggaaaacggctgatctgtcgggtagccgattccgacaatcaccgccggaacaacgcctgttttttcaggtcgccggctttgcacccgcaaagcttcggccattgtgccgaatacggaattcgcatcgagcaggtatatgacggggaagccggatgcaggcggttcttcctgaggaaaaaagacaaagatacgatacgtacggcctccttttgagcgcatttctcttacttctgtgcccggaaccgcgtatcggccggccggcgcgaaaccccgctttatttgttttccgtccattatgtgttcatcccctttgcggcaattgctttatctatgcttattgataatgattttcaatatcaaaagacacctcaaataataggttttttgccaaacaaagtcaatggatttttgatataaaaaaagcaccttatttcaataaggtacctaagaactatatagtgataggggcttaatcccatgtaaagcgctcattcttccatggatctcccctcatatggtagccgtttttctcccaaaagccggggtggttttcctttgtgaactgaatgccgcgcagccattttgcacttttccaaaaataaagatgggggaaaacgcctctgagcggatagccgtgctctggcgttaacggctcgccgttatgcgcatatgccagcagggatgtttcccgcgtaaaatcagaaagcggcaggttggccgtccagccctcttcagcgtgcagaatgacgaatcccgcttctttgtgcacgcccgctttctcagcgatgtctttggcgcgtattccctgccagatattatcaagacgggaccagcccgtgacgcaatgaatatcatttttcacttcggcttcaggaaaggctttgatatcttcaaagcttaacagcataggacggtcaacaagcccgtacacttgcagattccattttgacatatcttcataataaggaacatttccggcgtgaagcacgggaaacttcgttgtgacattttggtttggcggaatccgttccgactgttttgtttgtttcgttttcccgaaaaacatatggctccctccatttagtaaacctgtgttaaatctttgttgacaatcaatcacccttcgattacgctaatctggtacaagtgtaagggggaaaacaaatgaaacaacgcaaccttcgcgcgggcgatatggcgcttatcggcatgtttgccgcactgatggccgtcggcgccaacattacatcaatggctccttttttgcaagttgcgggaattccgttatcgctgcagcctttcttttgtctgttagccgcgatgcttctcggcgccagacgggcagccattgcaatgacggtatacgcattggccggactcgcgggggcgcctgttttcgctcaattctcagcaggctttgcgccgtttatcggaaagagcggcggatttattctcgcttatatcccggcggcatttgcagccggatggctgctggaaaaaacaaaaaaacccggccgcctgcattatgcatgggcctctttgatcggtaccgccgtcatttatatcattggcacgacctatacgtatattgcgctgaaattatggcttcatgctccgatcagctacggaatggcctggttttacatgatatggtttttcataaaagatatcgttttagcactgttattggcatcaatcgcgcctgccgtatacaggtctattcataaagcgacggggttcagcagaaatccggcgtaagatgttctcagcatacaaaaaggctcccctttccgggagcctttttttacaggacaagcgcggcaatccagccgaatatcacaagcggaatgttatagaaaagaaatgtcggtacgcacgtatcccaaatgtggtggtgctgtccgtcggcgcttaggcctgacgtcggcccgagcgtactgtcacttgcaggagaacccgcatcgccgaccgcggcggccgctccgattacggcaatcgtcgccatcgggctgaatccgagctgagcgcacagcgggacaaatatggtcgtaatgacgggtacggttgcaaatgatgatccgattcccatcgtgattaataaaccgaccaccagcatcaggagcgcgcctaatgattggctgtggccgataaggcctgttgatgctttgaccaaggaagccacatcgcccgttttattcagtacatttgaaaaaccggccgcaacaagcatgacaaacccgataaaagccatcagaatcatgccgtccgtgatcagcttatccgcttcattgcgcttcatgactccgctgataaacagcgtaaacaagccggcaagcgcgcccataatcataccttccactccgagcacttgtgacagatagagctgaacggcaagcgacacggcaatggagatcaaggcgatggcaatgctttttttcgtataaggagaagacgatagtccggcaatctccttcgtctcatatttcttcggtttccggaagacgatgacggctaaaattaaaccgaccgccatcccggccgtcggaatgattaaagcatacgggatatcactgagcggcacctttaaaccggctgacgccatattatctctcagcatcccctggaaaatctgtccgaatccgacaggcagaacgatataaggcgcagtcagtccgaatgtcatcacacacgcgatcagtctgcggtctatttcaagttcgttaaatatttttaaaagcggcggaatcaatacaggaataaacgcaatgtgaacgggcaccacgttttgcgagaaacaggatatgattaaaataatcagtacgattaacacttttgacagtgcttttttccgcgaatcttccttttttccgattagtttgacagacgcttccaccattgcatcgggaagccccgtctttgtcagcgccgcggcaaatgctccgagcagcgcgtagctgaccgcgacggtggcatttccgccgagaccgtccgtaaaagccttcaccgtctctccgaggcctaagccgccggtcagcccgccggcaagcgcgccgatcattaaagctataataatattgacacgcagcaggcttaagacgagcataagcaatactgcgacaacaacagcattcattgatgagtccctccaaaatcctttagtttgctaatgtagtagataattaaagttaccatatattctgcgctttagtcaactaaagattttggaaatcaaaaaacccgctgcatcaaggcagcgggatactgttatctttcgggcgtaaagcgctcagtcaaaacagccaacgtccttgccatgacgcctgttgcgccggcagggccgaagcatgtcgctttattcgccgttgcggttcccgcaatatcgagatgaacccacggcgtgttttccgcgaattcaccaatgaatgcccccgccataatcgcgtggccttctcttcccggagaattgttcaaatcagccatctgactgtttctcacccgttttttatccttttctgtaatcggaagctgccagatcggctcaccggattctttcgccgattccgccacctgttcataaaacgcggcgtgattggtcatggcgcccgttatttcgtttcctaaggcgacaatgacaccgcccgttaacgttgcgacgtctacgaggacagaggctccgttctgcttggcgtatgtgatgccgtcggcaagcacgagacgcccttccgcatcggtgttcaggatctcaacggtttttccgctgagcgaaacgatgacatcatccggcttcatcgcatcggacgaaatcatgttgtccgtagacggtatgacggcgagcacgttttgttcaggccgcagttcgccgataatttccattgcccctaataccgaggcggcccctcccatatcgcttttcatgccgacgatgccggttttcggcttaattgaatatccgcccgtatcaaaggtaattcctttaccgaccaggccgatgacgtcttcccactgatctttgccctgatacttcagaacgatcattttcggcggttcggatgagcccttgttaacggcaagcagcccgcccatgccgagctcttccatttcatctttttctaaaatttcacactcgaaatcgtattttgccgccagctcagcggcatatgacgccaaatcagtggccgtcagcatattacccggcatattcacaagcgtgcgggctgaattcgtcccttggccgtatgccgctccgacgttcaggccggcctgcacttccctcaggtcttcttcggtcacggcgcagactgatttcagttcctgatccggctcattcgatttatgtttataatcctgcacttcgtaaaccgcaagcagacagctttctgaaagcgcatgagcggcatcggcggcaggcacttccccggagacgaatgtatcgagtaaaacggatacttcctgttttttatcttgatgaacctgctgaaatactcgtgcaaagcattctttcgtatcttcaaacgaataatccgcttctcttcccaggccgataaaataaatacgtttcataccggtcgcagccggagggtatacttttgatacacgattgcgtttggcggacacatcaccatcctttaacagctgggtcagatgaccgtccaatttatcatccaattccttcgtaaatccgttcagcgtgcttttttgaaaaagaccgatgaccagtgtttcgggatgccgcagttgatcagatgcataaaacatgagtacacactccttatgtgggtatttgttatgtaaagtggtataatgaaaaaacatttttcattgattttattttaccaaactaagggcgttttctgcagtttttcgatacgatcggaatcagcagatacagaaaggatgttgcatatggatgtacttatgaattttcctttactggcgagttttgccgccattatttttgcccaagttgtaaaagtgcctattcaatttatcgtatccaaaaaacttgactggtctcttgtgacgagcaccggcggcatgccgagctcccattccgccgccgtcaccgcgctgtcaaccggagtcgctttgcaacaggggctggactcgcccctgtttgcagtcgccgcgattttcgccgtcattacgatgttcgacgctacaggtgtcaggcggcatgcgggtgaacaggcgacggtcattaataaactggtcatcgactttaatcggtttgtcagcgaagcgaaggactttcagaaagcggaagagaaggaaaaacagaagaaactgaaagaactgctcggccatcagccgattgaagtgttcttcggcggcgtcaccggtattgtgctgacattgattttagattatttctttatgtaaaaaacgcttcagcggatgctgaagcgtttttattcttttaccgttttgtattgatttctgaacacttgcatcgactttgtttcgttcagctttacaagttcgtcctcggtcactgtgccgttcccttttttaatcatgtagacctcaagtgtttttttgccccaattgttatagacgtccttgacggtgtcaaagtagaggtcaaggcggcttcctttaatttttgagccggtatcggcgacaaccccgtatccgtaattcggtataaacagaatcgtcccgatcgggaaaacagacggatcggccgcaacagttgaatataaatcgcgtttgaccttcacgcctgaatatgtaattccgtactgcggatgcccgggagattttccggtagattccgctccggcggtataaccggtggccgtcaccttttgtgacggatagcgttcccagtcaaaagcttcttccagcggttttatcctgcctgatgccttcttttccggctgattctgtaaggattgaaacggagtgccgatgtttttcaaaacggcgccgcgatgttccgtcatccaatttgtcagatcctttgcttcaactccggttatggaaaagtatgtcgcatggcatgcgcccaaaaagagcacgatcatgaatacgcgtctgattatcgtcaatctgaaatcactctcctccgagtcattgttcccaactcggtggggtgctatacaaaaagcgccgcggcacaaaaaaagctttctcgaataagaaagcggcttaaaacatttgatatcctctttttctgagcgcctttatggcaatgcctgacatgatggctcccgccagtccgcccgccaaaatcacgacatccgcaaccgctaatgacatgatgcgctgaaacaggctttgaaaggattcccccggcgcctgcacgtaactgatcatctttttattgctgataatgaaaaggcatacaatcggatagacaacagccataatccacgacattctaagcagcatgttcaacagaaagcctatgccgaaaaacagtacaaaaaatagtacaattgagatcaggacaaccggcaaactaatcacaaacatccaccccctacagcactttcagtgtacctcgggggcggtaaaaaagtcaacgtctggaaaaatcagcgtctctctttgccgcttccctggcaggagggacatgtttcggagccgccaagaagcaattgaaaataccctttacctgagcagaacggacacgccgccgtgctttttgctgtcgttttcatgcggatcaccctttttcttaattttctgataatatatcatatttacttgtcaagcaccaagtcagaatatgtaacaaaataactcatgtaagcgaaaacattcatttttttcttttacattcttttgatagcgctcttttttaaaagaagagaaaacccgcggctgcgggttttcagaagaatttaaacttcccttttttcagcgtcaggcccagcccgccgatcataaagagcgatcggttgtcaatgacctttttcataaaggacgccggcatgcctttgagcttcctgccgtatacgactccgacggcgttatgctcaccgagagaggcgacggttcctttaatgtcaggcttgaactcttcaagctggcctcctttaatcaaaccgcccagatttttggcgaccgtttctccttgctgcatcgcgatctgagcagtcggcgggtacggccgttccgtctcttcattgataaagagcgagctgtcgccgagaataaaaacatcatcatgacctggcgcccgaagatcagggttgaccttgacacggccgcgcatattttcaaaacccgcttcctccacgatcggatgtccgcgcacgcccgcggcccagacaacggtctgcgatttgatttcttccggctcttcatctttcttgccgactgtgacaccgtctgcgcggcattcttgaaccgcggtgccgattttaaattcaacgcctttgctctcaaggtattgaacggcgtattcgacaagctccggatcaaatcccggcaaaaccgtcggggcggcctcgacacagacgatccggacgagactttcatctatatcataatatctgcataactccggcttgcggttcgcaagttcaccgagaaattcaattcccgtaaagcccgctccgccgacaacgatggttaagcggtcagggcgtttttcggcctccgtattgtatgtcgcaaattggagctcaatatggtctttcagctggcgcgacgtattaatattcgcgatcggaaaagcgaattcttttaagcctttaatcccgaatgtttcagggacggcgccaagcccgatgacaagataatcataagggatgtccccgtgtgaaagcgtcacctttttattttgcacatctatcgctcttacggtatcctgcacaaatttgacccgtgattcattgattacatcttttatttgatatctgcagcggtcatgatgcagcgttcctgcgctcgcttcatgcatccatgtcgtttcataatgataattgtgtttattgaccaaagtaatgtcagcgtcatttgcctcgatatgcttcggaagccttgttactgtcattaatccaccataacctgcacctaaaaccacgattttgggtttattcaatgccatcacatccaccttcttttttttgctgttagacgcataatcaaatcaacatttgtattagcttcagcttattggcgggattttatgaaatgaaatataaaattttttagaaaaccgcacatgtctgcatatcaccatactatccggaagaatcagaaaacattcaggaaaaaacagattggaatttgtccccatattagcggcggccgcaacttttttcaagaatgaagcggccgggcggttttcggcactcgtcatccttttaaattgtatgttataattaataacaattttcaattaggaggcaatttggtatgcaagaggattcaaaggtttatgatattacggtcatcggcggcggcccggtcggcctgtttaccgctttttacgggggaatgagacaggcgagcgtcaaaatcattgagagcctgcctcagcttggcggccagctcagcgcgctgtaccctgaaaaatatatttatgatgtagccggattcccgaaaatccgcgcccaagaacttgtgaacaacttaaaagagcaaatggcgaagtttgatcagaccatctgcttagagcaggccgttgaatctgttgaaaaacaggcggacggtgtgtttaagcttgtcacgaattcagaaacgcattattcaaaaacggttattatcaccgcgggaaacggcgcatttaagccgagaaagcttgaactggaatcagcggaacaatatgagggcaaaaacctgcactacttcattgacgacctcaatcaattcgcaggcagacgcgttgccgttctgggcggcggcgattccgcggttgactgggcgctcatgcttgagccgatcgcgaaagaagtcagcatcatccaccgccgtgataaattccgcgcgcatgagcacagtgtcgaaaacctgcataattctaaagtcaacgtgctgacaccgtttgttcccgctgaacttgtcggtgaagaccggatcgaacagctcgttctcgaagaagtgaaaggcgaccgtaaagaaatcatcgaaattgatgacctgatcgtaaactacggctttgtttcttctctcggcccgattaaaaactggggacttgacatcgagaaaaattccatcgtcgttaaaagcacgatggaaacgaatattgaaggcttctttgccgccggagatatctgcacatatgaaggcaaagtcaagctgatcgccagcggtttcggcgaagctccgacagccgtgaacaatgcgaaggcttacatggacccgaaagcgcgcgtccagcctctgcattctacaagcatgtttgaaaaataatacaaaaaagagtctgtgtcataccggcacagactcttttttatttaaacatccaaatataattcatgacggttccgacaacgagcgcaatgacaagcgccgacacgacccaaatcgtgcctaaaataatccggtcctgaattttctgggctttcgggctgtgcccgggctgtttttgttccacaccggcccctcccttctttgcaaatctatctatcgtaacaaatgtcttacaacacccaatactactatgataaccaaactgcaaatggatgacaagctgaccgcatatgaggcggcatgaaatcatttgacattcctgacaaaacaaagtacattataaaaagacgaacattttaattttatttaattctattattcgcttttaggggtgttatatatggaaaatgtatttgattacgaagatattcagctgattcctgcaaaatgcattgtggacagccgatctgaatgtgatacatcagttacattgggcggacacacgtttaaacttccggtcgtgccggccaacatgcagacgattatagatgaaaacatcgcggcctggctcgcggaaaacgggtatttttatatcatgcaccgcttcgagccggaaaaacgcctggcttttgtccaggatatgaaagcgcgcggactgatttcttccatcagtgtcggcgtaaaggaaaatgattatgaattcatccgggagctgaaagcacaggagcttgtgccggattatattaccattgatatcgcgcacggccattccaatgccgtgatcagcatgattcaatttattaaagaacatgtcccggaaagctttgtcatcgcagggaatgtcgggacgcctgaagccgtaagggagctggaacgcgcgggcgccgacgcgacaaaagtggggatcggccccgggaaagtctgcatcaccaaaattaaaaccggcttcggaaccggcggatggcaattagccgcgcttcgctggtgcgcaaaagcggcgagcaaaccgatcattgctgacggcggcatccgcacgcacggcgatatcgcgaagtccatccgtttcggcgcgtctatggtcatgatcggatcattattcgccggccacgaagaatcaccgggacaaacgatcgaaatcgacggaaagctgtacaaagaatatttcggctccgcttccgaatttcaaaaaggcgaaaagaaaaacgtcgaaggcaaaaaaatgcatgtcgagcataaagggtctttacaggacacgctggttgaaatggagcaggatctgcaatcttccatctcttacgccggcggcaatacactcgaagccatccgcaatgtcgactacgtgatcgtaaaaaactctattttcaacggcgacagattttaacacgcagcagggccgctcaaagataaaaaaatgacattcaatatgaatgtcatttttttattaaataccgaaataaagagccgcactggccaacagattaatcacaaaaataaacaaaaagatgtaacgaatgaatttattttgcaccggtgcaaatataaagagatatagtcctgccaccccaaaagtaagaacaggaaacagccactcaaaggataaagaaatgatataaccgataatcataacaatcggcacaccgattaatgataatttacttctcatatgatttctgccccttttacttaaaaattggtgtgatgtaagcttcaataatggcagcggcgatcagcagacaaataattatgagcaccaatattccaatatgcctgaacattgaagccattatctttttttccttagaaaaacacagcctgatgaccaattcaacgcccttaaaaccaatggcgccacttaataataacgcgggaacttcaaatataccatgaggaattagcagtaaaaaaatctgataaaaaggaaccccgctatgcagattttctataatagagccgcttaaaataaacccgttggtgaataaataaaagattgaggtcaacccaaaggtaaaaaaacccgcggctaaaaacagacaagcgattgcattgtttttcagcagttcaaccgcgcctgacgagccgttgtaagacgcggttgaaacaaagtgatcggaaaaaaacgcagcgatcacaccgcctgaaaaaaacagcaatgatgcggttaacggagtggcggacgtcctgattgccggcaacatgcggttcatcatgtatagatactctcagccaatttttcaatctcttctaatgaatgctcggatgactgatactccgccgcaaaaacgccttcatgtataataccgattgtatcgcacagcgaatgcgccagctccagcaagtgagtcgataacaggaccgtatgtccctgcttgacgtactcctttaataacgtccgtatcgttttaccgctgattaaatcaatgcccgtcagcggttcgtcaagaattaatatctttggctgatgaatgagggcggccgcaattgataatttttgtttcatcccatgtgaatatgttttaatcagctgatttccgtcttgagcaagcttcagcgtctctaacatattctttatatactcatttgtccgctgagacggtacttcaaacatctccgctgtaaaacgcaagtattcgactcccgttaagtaatcatataaaaaggcatggtcgggcacaaaaccgatatcagccgatatttgccccccctcttctgaatccagttccttaccgtcaatcatgacgctgcctgaagtcggtttaagcaggcccgaaatgattttcaaagtcgttgttttcccgactccattagtccccagcaaagcataaattgagccttttttcacctcaaacgaaatatctttcaacacctgtttttcactatagtttttttgtatattcactaatttaatcattgttcgcaaacctttccgccatattgattctgcgaagaaacagaaacatgactccatagtttaatagtgtgaacaggacaaaaatacttgatgcagaatgaataagcatcgtttcaatttccggctttttatagataaaatacgacgtgatcgcagcgatttgaagcgacacaatgaaaatgaaagatccgtataagttgttatacgtctttgctttccccgcttctccaatttcgtacatatgctcccagtttttcttaggatacagggcggtgcttgaaatctggacaagactgtataaaaaacccgaacataaaaacacaataaacaagtaaatcgtcagcgcagcggaagacggaaaaaacaccgtaatcaaaatggtgatgatgaacgaatagataagagcggcgagattataaatacatactttcggaaacaccagctgccacgcatgtttgatattccggtgaaacagatgctgattttttatttccccgtcaactgacaatactgttttgagcgcatctccgacgagctgatacgaaaagttcgcaatgataaccgccgcagacacgatggcggctgccgaatacccgataaaatgatgcgacagaagcggaatacaaaaacctaaaaacagcatgaacaaatacagcatactgccgaagttcctgataaaaaacccgtcaattctcgataaaaacagcagatccttttgaaaaacggcatgaaatattttgttatttctatataatttcagctttggcgcaaaatctgcatttgtcaaaaacatataaggaataaggtccattttcctcagcgtggccgaccatagtttaaacatccccgccgttaaaaggacggcgaccgcaaacaccgcagcgaaaacgagcacggaatgtgagcggaatgctaaccatacatacggcgtattcatgaggatgttccggaaagccggtgactccgtaaagcttgaaatatcctttgcggtatactccccaaacacgagaagataaacggcatacccgactgcaagcggaaccagcaggctgacgctgaataaaatgcctttcatgattttcaagtaaaacaatttgctccacatatttgtaagaagataaacaacataagaaaacagcatagataaaaataaattgagaagaaaataaacgaagcccaagaaaaatacgatgaccgccgcagacccggtcatgcctgcgcttgataaaaacaaaaagaccggaaaaacaaaaagataccatacgaaaatggtttttttgatcgcctggccggcaaaaacagaaaacaactgtaaaaaacgcaccttttttaattgatgaatgaccttgcgcgtatcaagcagaaaggcattgtggtgttctttaaagaagccggcagcccaaaaaagctgctcaagtgaaacggcgattaaaacaaattgcccccatgcgctgaggggcagctgaatcagttttgtcccgaatacaacaccgcatcccaggaaaacgagatataaacataacagagaaataataatggcagacagcagtttgctgttgagttgaggaatgccccaatcttcctttctttttcgaaacgatgacagggtattatatttgataagagccgcaatttgtttgactatcatactttcaatccttacatatgtatttgggagagaggctctttttgcagcttgtacaaaaagagcaattatttattgatcgattttaccaagcagctgcgtattttttgccgtatttcttaatcattgtttttgctgttgcaacgattgcataagaaatcgcgcctgcgcctgtaacgataccgataagagaaatgatagaagcaattgttgatgccgcatcaataatatcaattgcttttttagctgcggctgtagagatgccgagagtagaagctaattcagcattggctgagaatgcatgagccgccgccacgtttaattcagttcccgttaataatagtgcataaaccaatgttgctgcagcaagagccgcgccaaacaaaatgaaagactttttattagattttactaagttcatcataacatctccctactctgtttttttaatttataataaaattcagcttaattgactctctcccgagctaaattttatccgccataaaatagtttaagaaaatagtaaagagttttagtaaaacaaaacatccagtcaaaatgattctcttgcctttactgagatcggtcagttttcccgcagcagcataaagagccgcgattgatatgagcagaaatggatccagcagctgcagactcaagctggtgccgccggcagaatatataagcgaggaatcagccgttaagtagttaacaactgaaagaatcaacattttaaatgccgagattaaagaagtcagcgtatatagaagcaaatatatttttttcggtttttttgtaccgagaataaaagcggcaacgaataacagaaatccgcctatcagaatttccacaaaagttgtgaagatcataaacccttgcagaaacatgacaatcgtacgaacacttttctccccgatatcgtaggtactttctccgacggaagaataatacgactgcagaactttatctgaaatactgaattggaagagtaatgaacagatcaaaatgatgaaaaaagaacttaaaaatatttttttattgctcaattgacctatcatattatcatccttttcttacaaaataaattaactattctatacttttacaatttagtttaatcctatcaaaaaatcaatatcctttcgaaaaatatgactttaggacgtgttgacaatgagcacatctttcagagttttcagttctatataccctttattttttttttgaatttgcaaatagtatgatttagacaattgatttgaagttttaggaagaacctgtcgaaagagacgaaggatataaaaaaggaggatatcgtcatgtatcctccggatgtatgatcgccaacacctgatgatcttcccattttccatttatttttacattttttctcgcaatgccttctttatgaaagccagctttttcgagcacccggattgacgccttattgtgcggcatgactccggcttctatccgatgcagtttcagctcattgaatgcataatcgactgccagcttaacagccttcgtcgcatagcctttcccgttatgtttgccatctaaaaaataaccgataaaagcgctttggagggaaccccgaaccacctgaaaaaggctgatcgtgccaatcagggtctgatcttgaagaaaaatgccgaagctgtattcagtatcattttccgcattcttcagtgattgttcaattcgttttttccggccttccagcgtataaaaatcctcttgtctcgacatggcaaaccgttcaaagaacatgcggttttccgtctgcaaaaccagttcctgctctgcatcattcaggctgagcggcctgatatcaacgctgtttccttcctgcatatgcatcgccgtccttttgttttgatcagaaacgttttttaattgcctctcacccatgtgatacggtacgctttatcgcatcaagaaaattccaagacttcacattcggctttcctttcgtgacctatgtctgatgtgagtaaccgaaacggaatcacaaggttcttttgttgacttaaaccgtgctttaagccgtatcatcatattgtgacaaggaaagaatagttttggcgggtttcccgatcatccaaaaaatatattgattggattgcagctgcaggatagaagcgggagctgaaatgttatctaagaagtatgaaacaatcggaaaagaggagttaatatgaaactgacgggaaatacaatactgattacaggcggaaatgccggaataggattggctttcgcagaacggtttttaaaagcgggaaataaagtcatcgtgaccggacggcgtgagcacgctcttcaaaaagcaaaggaaacattcccggaacttattacatatgtcagtgatttgagcattccatctgaacgtagatcactgtttgattgggtgaaaaaaaattatccggaagtgaatgtgttagtaaacaacgcggggattcaacaacgttttcatgtgctgaaagcggatgcgaaggacaattgggactatttcaataaagaaatcacaacgaacattgaagctcccttccacctgtctatgctgttcgctccgttttttgccgaaaaaaaagatgcggctgtcattaacgtctcttcgggattggcttttacaccgcttgctattgcaccgatctattcagcaacgaaagcagcgcttcattcatttacaatgagtctgagacatcagctttctgattcatctgtagaagtgattgaagttgcgcctccggcggtgaatacagatttaggcggagcagggctgcatactcaaggagaaccgctggatgaattcgctgatgggatttttaaaggactgaaagagggcaaactagaaatcggatatggttcttcagcggaacggctgcgcatgtcacgggataaagccgatgaacatacggcaaatatgtacaatgcaatgaaacatacaattgaataacatctttaaaaaagcaaaacccgcttctgttgagcgggttttatttttattaaacagataaacgcctttcttaacaatggtgcaagcgccaccgaaaagaaagacgtcatattttttcatcctaagaatggcgggttgacccttagcactcttccggcgtaccggcgtttttggccgtgcggaaagatgaaccgcagccgcaggaagcgatggcgttcgggttgtcaatggtgaaaccgccgcccatcatggactgtttgaagtcaatgatcgtgccggtcatgatatcgaggctttcgctgtcgaccaagacggtgattccgtgctgttcaaacatgctgtctttttcgcctttttcatgctcaaatcccatcccgtaagacaggccgctgcagccgccgccttttacgcccacacgaaggaacgcgttttcttcttcatgctctttcatcatatcttttatatgcaaagccgctgcttcagtgatggttactggaacactcataggtagacctccttttttaaaaacaatgctgatatctattataaaccttgaggagagtatttctcaaacgagctgtttacaaataaaagacgccgctgcatacggtttcggcgggtcccgtcatcagcacgtgcccgttgtcctgccaattaatcacaaggtcgcctcccgctaaatgaacggtgatatcccggtttcgttcggaaacaccgttcaatacggatgcgacagccgccgcacaggcgcctgttccgcaagcctgtgtaatgccggagccgcgttcccatacgcggaaatgaagttcatcggcgctgacggtttccacaaattcgacattgacgccttccggaaatctcgggtctttttcaatgacgggaccgagcgttgtaagaggcgcttgattgatatccgcaaccggaaaaacaatatgggggtttcccattgatacggctgttccggaaagctccgtttctccaaaaacaaaggtttcatcgatcgtccgttcatcttcattgccgagcatcggcagctcttttttggtgaggcgcggttcgcccatatcgacggcgacttcacgcacaatcccgttgtcctctgtaatgtctgctttcacaagacctgaaagcgtctcaatgaaaaaggacgtttcttctgtcagcttatgttcgtatgcgtactttgccacacagcgaaggccgttgccgcaatttttcccttctgagccgtcattattaaaaatccgcattttgacgggcgctttttctgacggacagatgaggatcattccgtcagagccgatgcccgtgtgaatgctggacactttaacggcaatctcagccagccgttcttccggcagctgttcttcaaattgatttacatatatataactgtttccaagaccgtgcatcttggtaaaacggaatgaattcatatcggcctccaactttttttcttttacttagtataaaagctcttctgctcggacacaatacaaatatcccccgtttttcatacataaaagctccctgcatatgcagggagcttttatcgtttactacataaacatgccggcaatcgccgcgctgagaaggtttgcgagtgttcccgcaataaccgctcttaatccgaggcgcgcaatgtccgaacggcggcttggggccaatccgcccagtgtgccgagcataatcgcaatcgaagagaaattggcaaatccgcacagcgcaaagctgataatcgtagacgtttttttagaaaagtccgcaatatgcggaccgaagtttgaataagcgacaaactcattcagcacaagtttctgtccgatatagcttcccgctccgagcgcttcatgccaaggaacgccgattacaaatgcgatcggtgaaaacacgtaaccgagaatggattctaatgtaatatgtttgaaaccgaaccagccgccgattccgccgagaattccgttcactacggcgatgagcgcgacaaacgcaagcagcatggcgccgacatttagagcaatctgcaggcccgttgacgcgccttttgccgctgcatcaatcacattagcggcgccttcgccttcttcgtccatattaaaatcgccttttatcgtctgcgttttttccgtttcaggtattaaaatttttccgaacacgagaccggcgggagccgccataaagctggccgccagcaggtattcgatcggaatgcctaacagggcgtaaccgaaaagcgtcgaacccgctacagctgaaaggccgctcgtcataatcgtaaacagctcggaacgggtcaatcccgcaatcagcggtttaatggcaagcggtgattcagactgtccgacaaaaatattcgcagccgccgcaagcgattccgttctgcttgtcccaagaagttttgacagtccgcctccgatgacgcgaaagatgagctgcatgattttcaagtgatacaaaacggcaatcagcgctgagaaaaagataatgaccggcagaacgctcagcgcgaaagccgggctgctgcccacttttaacagcgggccaaaaataaagctgatgccttcgttcgcataatcaatgagaagctgcacacggcttgagaaccataaaaatacggcccggccggcgtcccactttaatacgatgaatccgaaggccatttgtaaacataaaccgacaatgacggttcgcaggttaattttgcttttcttctctgataacaaaaaagcaatggctaatatagcaactgccccgagcagcccccaaacgatattcaatgaatccacctctaaaattttatttaaaaaaagtctttattaagataacaatatttatttttgctgtctacaaattttttattttgccgaaacccggggcgcaataaaaaagagaccccgttcggagcctctgattaaaacatcggattttcttctatgaatgtatatatgttgtcaaccaattcagcaggcgtgccccccgtgaccacttcgccgttaaccaaggcgaacagggactccatgcattttccgcagtagcttaaacagccgtactcaagcacgtccaagttcggatccttctctaagatctcaagtgcttcctgggaaccgcgcgctaaattgctgacacagaattcaatcatcggattcatgcggtttcacctcacatatgtaccttatcctaacggaatttcctctattcgtcaaagatccggtttcacgctcaatgttatcgtaacatattaattcaggttaaaggttttactattacgtgttttctggtcaatttgtaggttattttaaaactattattgtggttttagatcaaattcgttataattctagatgttattttacatagttcgttattttgtaacaacattgactaccatatttttcgggcaaaaggggaatcattatgaaaaaattggtcttgatcggcgggggttacggaaacatgagggtgctgcaccgcttactgccgaaccagcttccgtcagatatatccatcacgctgattgacagaaacccgtatcactgcttaaaaacagaatattatgcgctcgccgccggcacgatttctgatcatcatatcagggtgtcttttcctgagcatccgaatctggatgttcaatacggtgaggtggcttccgtcgacacgaaaaacaaacaggttctgtttcatgaccgcgaaccgatttcttacgatgacgcggtgatcggactgggctgcgaggataagtatcataacgtgcccggcgcgccggaacatacttacagcattcagaccattgatcagtcacgcgaggcctatcaaaagctgaacaacctcggcgccaatgcatctgtcgctatcgtcggagcgggattaagcggcgtggagcttgccagtgaattaagagagagccgtgacgatctgaagattatgttatttgaccggggcgacctgattttatcaagctttccgaaaagactcagcaagtacgttcagaaatggtttgaagaacacggcgtcaccattatcaataatgcgaatattacaaaagtggaagacgggatcgtttataatcatgatgaaggaataccggccgatgccatcgtgtggacggcgggaattcagccgaataaagccgtcagagaaatggacgctgaaaaagatccgcagggccgcatcgttttaacaccgcaccacaatcttccgggcgatgagcatgtttacgtcgtcggtgattgcgcgagcctgccgcatgcgccgagcgcccagctggctgaagcacaagcggaacaaattgtgcagatcctcctgaaacgctggaacaatgaagagctgccggaaacaatgccgcaatttaagctgaaaggcgttctcggttcactcggaaaaaaagcgggcttcggtcttgtcaacgaccgtccgctcatcgggcgtgtgccccgtttattaaaatcaggccttttatggatgtacaagcatcataacggctgataagaaaaaagccgctgattgcgatcagcggccatttttaagagcctgccacatagccgcgcttttccatttcttcatatatatcttttaaatgcggattcccttcccccacaatgacatcctccaccagcacgagcggataggaaaattcatcgtttctgatgcgctccgcaagctcttctgtctccttttgctgaggcggtgcgtcaatatcaatataccgcatgttaaaaggctgctccgggtatttccgtttcagcgccgcctccagccattcaaacgtatctttggcgctcggcatattcacgcagcttgcgcaaagcgtttcagcgccgtaaacactgagcgtaaccggctttgtcatgtacatcatcccctttacaccagtatacaaaggacggggcagcttttgtataaaaaacggtttttatgttcaagtttaaatatgctataatggagaaagcagctttgcaaaccaaacattagatttttaccgttactgtgaatataatggttttatgtatatgaaaggagcgaatctcatgactgaggttgaaatgaaagagcaagtacaggaagtattggataaattacgtccgtttctgcttcgtgacggcggtgactgtgagcttgttgatgtagacgaaggcattgtaaagcttcgcctccttggcgcatgcggcagctgcccaagttcaacgattacgctgaaagccggaatcgaacgcgcccttcttgaagaagtaccgggtgtcgttgaagtagaacaagtattttaatcataaaaccaggctgcatgacagcctggttttttattttttacaaatagtcatcaaaccatgaacaaatataacggatgcgtttcatccgctgttccggatggccgcttctcgacagctcatgcgtagctttcggaaatcggatgaacgacgtcgttttgttcagtttcttcaatgcagtaaaaagctgctccgcctgctctatcggacagcggtcatcgcgctcaccgtgcaggatcaaaagcggcgtcgaaacgcgggacgcatattttacaggagaacgatcccaaagcttatccgcttcctcaaacaaatcatgtccgagctgccagtcagtaaaaaagaaaccgatatcgctgacaccgtggaagctgaaccaatttgaaatggagcgctgcgtgacggctgctttaaaacggcctgtctgcccgacaatccaattcgtcataaaccctccgtagcttccgcccgtcacaccgagacggccgctgtcaataaacggatacgcctgaacagcttcatccaccgcctgcatgacatcacggtaatctccgcctccgtaatcacccctgacacgattgacaaaatcctgcccgtagccgtggcttcctctcgggttgacatacacgacagcatatccttgtgcggccagcacttggaattcgtgaaaatacgtatggccgtacatcatgtgaggcccgccgtgtatgtatagaatgagcggataagtttgatcctcttcaaaaacggcgggctttaaaaaccagccgtttaccgtcagcccgtcctttgtttcatattgcagcttttccggcacggatatgatgcgatcctcaataaaccgattattgtcggatgtcaattgcttctcttccccatcttcgagcgaaatgctgtaaagctcggaaggctgtgcgggtttggcaatgacagcgatacagcttttctgatcaggatgaaaagcaaaaccattcacgtactcttcttctaatcggatcggatagacgaggccgtcaatcgagatataataaataccggtgcttccctgctcgctcccgagaacgtaaaaaccctgcccgtcgtttgtccatacaggccggggcgtcacccctcctatgattgaatccgcaatcagcgcatcgctcaaatgaacatccagcatgtcggtcaggcaggagagccgctcagttttcacgtcgtacagccacgctttctctaaagtcgcattgcgaaattcattttcatggcccagcatcgcgatataagacccgtccggtgaaaacacgcaggaaccgaaagaaccgcggtgcggcgtaatctgcttcaggcttccgtccgccagattcatcagatagacatcgctcggctttccggcgtcacccggctcgcataaattggcggtaaacgcaagctgcctgccatccggtgaaaaggccgcgccataatgatccgcttcatgatccgtcagctgctgaatctcccccgtttcaagatgaatcagcacaagctgggaccagcttccgttcagcaggcctttcccgtcacgtttatatgttaatgattgaatatcaaccggctcatactcgtcatgcttctttttttctttctcatcggcgcgctccgctgatgtcagactgacggacacaagcacggatctgccgtcgggcgcccatatcggatctgatacgccccaaagaatatcggccgcctgctccgcctctccgccggcagcgtcgatgatgtacagctgagggatgccgttctccctgtcagaaacaaaggcgaggcgccgtccgtcaggtgaccaccgcggacttgtatttctgttgtccccgaaagtccacgggtttgagatgccggattctgtgtcatataccataatggctgaggaataggaatcacgcttatgattgactgttgtccggacgtaagcggctcttctgccgtcaggggcatattgcgggtctgtcacggatacgagtgacgcaatgtcctcctcggttatgagttttttcaatcgtatctcctccttttcttttttatttcgcttccctaaataaaaatccttctccagaaaaagaaagcgtccttctctgatgggaagaacgcttttttatcattatacacttttcacctgctctaaaggattccgttcaattacgcttccttctgacgggacggtaagcgccgcaatctcacagtgggggaaatgctcagaaagctgctttctcagctcttctccctttcctttttcaatcaggacaagaatcgtcggtcccgctccgctcagcgccgtcccgtaggcgcctttcatttcggccgcatgttccacctttgaaagctcaggaacaagcatggcgcggtacggctgatggaggatgtcttttctcatcattttcccggcgagcgcccagtcatttgacatgatcgcagcaacgagaaggttgctgacggcgcttgctttaacggcgtgccggtacggcagctctttcgggagcacgtctcttgcgtccctggtcagaacttcgtaaaacggaatcactgccacaacgtcgatatccgcttcggcaacacgcacgatatgtgtttcatcttcttcgtgaaggccgatcacaagccctcctgcaagggaagcagcggcattatcagggtgtccctcttcaagactcgctaagtgcagtttgtcgctttccgacagctgcaggccgcataactcatccgcaagctcaatggcggcgacgatagcggccgcgctgcttccgagaccccgtgcaagggggatgtcactccacactttgacatgggcgggcggcagctctttctgatagcggtcagccgtccgtttggcgacttggtagatgaggttgtccgttccttgagggatgcccgcgacagtttcggtttccgccgagaactgccattcatcgtttcggaaaaccgaaagcttcaaatatctgctgagcgccatcccgacggaatcaaacccaggtcctaagttggcggtgcttcccggaaccgtaatggaaaacagcatctccgcctcattcatacacgcgccgctccatttaagtattccagaatactgtcctcatctgtcggcagcgtaatcggttttatgtcagatacgtctacagccgtgttcggatctttcaggccgtttccggtcaaaactgctacaaccttgctgccttttggaatttcaccggatttcacctgtttcaaaacgccggcgatggatgcacaggagcccggttcggcaaacacgccttcttcacgggcaatcagctgataagcgtgaagaatgtcttcatctgtgacttcatcaatttttccggctgattcttccgcagcgagcacggctttgtcccagctggcaggattcccgattcggattgccgtcgcaacggtctctggatttttaatgacttcgccgcggacgatagccgcagaaccttccgcctcaaaaccgcgcatcttcggaagtccggtgccgtttttctcatgatattctttgaaccctttccagtaggccgtgatattccccgcattacctaccgggatcgccagaatgtccggcgctccgccaagctgttcgcatacttcaaaggccgctgttttttgcccttcaatccggtaagggtttactgaattcactaatgcaatcggtgatttttcgcaaatcgaccggacgatggccagcgcgtcgtcaaagtttccgtcaatcgcgatgatttccgcaccgtacatgacggcctgcgcaagttttccgaaggcgatttttccgtccgggatgatgacgatgcatttcatgccggctctcgccgcgtatgccgcagctgccgcggatgtgttccctgtagaggcgcacatgatggtatcattgccttcttctttcgctttggcgaccgccatgaccatgccgcggtctttaaaggatcccgtcggattaacgccctctgttttcacatgcagttcaattccgagcttttcggaaagtttcggcaggtgaatcagcggtgtgttgccttcatgcaatgtcagggccggcgtctgatccgtcaccggcagaaattctttatattgatggatgagtcctttccacattagctccaaccgttcccttctacgcgatatgtgctttttacttcttgtacgacttcgaggtcatttaagttttgcagaatgtcactgaaatcttcttccgatgtatgatgcgtgacgatgacgatttccgcgaggtcgtcatggcctttgatcggcagctgcagaattttttcaaagctgacgccgcgctctgagaaggccgatgtgatttttgaaaaagagccgacctggtctttgacgtgaattcttaaaaactgctgggcatagatatcagacggctgcttcagatttctttcaaactgcggggcgacaaagctgtttccgtttacgccgagacgcatgtttttcatgaccgcgaccagatcggaaacgaccgatgtcgcagtcggcatgcttccggctccggggccgtaaaacatcgtttcgccgacggcttctccgtacacgtaaacggcattaaactcgttatgcaccgcagagagcggatgatgatccggaagcagtgtcggctgaacgctgacttcgattttattgtcatcacgctgggcgatgccgatcagcttcatcgtatagccgagccgtttactgaagctgatatcttcatccgtaatccgggaaattccttttactttgacatcgtccagatcgacattcatagagaagccgagacgggctaaaatcgccatcttgcgtgcggcatcgagcccttctacatcggcggtcgggtccgcttccgcgaatccgagatcctgcgcttccttcagcacttcttcatacgggcttttttctttaatcattttcgttaagatgaagttcgtcgttccgttgacgattcccatcatttttgtgatccggtcagaagaaaggccttcttcgagcgtgcgtaaaatcgggattccgccggcgacactcgcttcataatacaagtcacagccattttcctttgcggcggctaaaagctctgacccgtatacggcgatcagatctttatttgcggtcacaacatgttttttcgctttcaaggcatcaagaagatattgcttcgtctgttcgacaccgccgatgacttcaataatcacgtcgacctcagggtcatcgatcacatcatagacttctgtcgtcagcacttctttcggcaggtctgcgtctcgttttttatcaatatctttaactagcacttttttgatcgtcaccggacagccgacctggtgcataagcttatcctgatgatcttgtataattttgacgactccgcttcccacggttcccagtcctaacagtccaatacgaatcgcttccaaagagaaactccacctttcttccttttgtccactagaaaaggacaattgttaacccttcacagacatttaagttacaaatattatataagcccgcatttgttttgacaagcggctgaatattgtttctacggctatgaaaacgcttaacacattgatatgacaagattccctattttctaaatatttttacgtcatattttcttacgaactgattccttttccgagccacgccacaggcgggacaaaaacctgcgccgacctgacattcatcatgttgtgacatgtctgtaaaaactgttcatagcgagtgcagtcggcaagaatgtagtcaagctgctcttcgtaaaactgtttttcagaatcatgagaaatgtaatagctctccaccgtctcgaagaaatggagcggaaacagcaggcggctgtaaaacaggcgtttggaaaaggaggataacggcgtaacttgctcatattcctgcagaaacaaaaatccatctttgagcaggtcgtcacgatgatacaaatatgtgctgcgcatatattccgcaatatcacgggcggcatggtcgaatacccaatcgcccggaatgcggatcaatgattcctccgaccaggtatcccgttccatccgctgatggcagattgtccccgagtcttctgcgccgggattgtcatccagctccgtatccactaaatattgaatggcgttttccgctaagcctgaataataaggaaatgcttcgatcattttcttttcgaacggttcaagcggagacatatgaattttctgcatccagaatgattccagctgatccacccgttttccccataagtccttccattggccgatcctgcccgcttctttcacttcgtacggaaaaccccgcccttttctgtgaaattcggcaagctcccctccgacagaaaacgaccggtttgagacgggaatcggcgcttttaagagcgcatacgttttgcctttgtcctcaaaggtcagttctccttccttcgtaaagataaacactgaaacgtatgggtcactttgttcttgtaaatactgactcatgtagtaaagctctgtcagctctgattgcgaaaacccggaaacgggaattataagaaagaaggaattaggcgtctggaagcattggtatttctgataaacggaaagctgtctgacgtggatgccgtatttttctttaatgatgcttttcatcataatcacctgcctgaaaaattagagctattcacatcgtagtcatacgccggcggaattatgaatacatattgtaatcctttgaatcaagtggagaaacatcgtacacatcggaagagtgttgtataaactagtaaaaaaagattgggtgaagcaaatgtcagaaaaggaacaactgaatcaggtggaagctgtcgccagggcgcgtttaaaagaacggggggttgagacggacgatattgccgagctggtgtatttccttcaaaaaaaatatcatcctgatttgacgatggaagtatgcaggctcaatgtggaccgtgtcatcgcaaaacgcgaggtgcaaaacgccattttaacgggaatagaattagatgtgctcgccgaacaaaaaaagctgtctgaaccgcttcagaccattctggcgattgatgaaagcctgtatggggttgacgaggtgctcgccttctctatcgtgaatatatacggctcgatcggctttacgaattacggctacattgacaaagaaaaacccggtattctcgggcggttaaatgataaatctactggcgaatgccatacgtttcttgatgatatcgtcggcgcaatcgcagcagcggcttcaagccggcttgctcacagcgccagaaatacagaataaggacggccgtcatggccgtccctttttttatagatgttcaatccattcggttaaagaatcaatcgcatatgtcggcttctggccgtaatctgccatatgctcacgctttgtcactccggtgtgaaccagcagcgtatccatgcccgcattgatgccggccataatatccgttgcatagttatcgccgaccatgagtgtttcggaaatatccgttccgagcacacgcatcgcctgttccataataatggattcaggcttgccgataaagacaggctcaacgcccgttgacaccgtcaaaacggatgtgagcgaaccgttccctggtaaaagtcctctttcagtcggaatggcgacgtcgccgtttgttgaaatgaaccgggcgccgtttctgatcgcaaggcatcccgttgccaacttttcatatgtaatgccgcggtcgattcccacaacgacaaagtccgcgttttcttctccgaagctcagcccgttttcttcaatggcctgacggatgccttcttcgccgatcacatacaccgacgcgtcttttttctcctgggcgatatgctgcgcagtcgccatgctcgtcgtgaagacctgctcttcagatgccggaatgtcaaagctcatcagcttgtccgccacctgcttcggcgtccgggaagaattgttcgtcacgaataaatacggaatgccgcgcgctttaagcgttctcacgaattcacacgcttcttcgattttttccgtcccgttgtacattgtgccgtccaaatctatcaaatatcctttataatccttcatactcaacactcctgtggattttctcactcgttgttatttaaatgcggaaacaggccctaattctgtttccaggtaggttcttacacgggctggaaaggctttcagcacgtccctgtttgacgtgatcagcgtaaacagctcctgatggtcggcgcgctgatattcctggacaagctgctttctggaagagatcagctgcttcagcttatttccttcatcctcagctaccaccttttcatccgtcagaatatccatgatgtcgtcataactgcccggatcgcgcatgataaagccgtcaatcatatcatttccgacatcgagtatgcattcgatcataagatggctgatccgctcaagcgcccttttttcgatctcgctctcccatgcaggcgtgctgtcaaacagcgcaagctgggtctcaaaaaaacggagtgtttgttcgatattatttctgtcaacaaaatacacgtgacagcatccccttctgcatcaattattttctgattcgttttaaaacaaaatacgcgcagccgaaattgcagtattcgtaaatgtattcgtccaatgtgctgattttcgtttcaaaggttgctttttgattctggtcatcaaagaagcctttgagccgcagctgactgtatccccagtctcccacaatgtaatcatatttatttaatatgtccgaatagcgggctttgaacgcttcttcattgaagccgtttttaaaatcgtgtacgagttcaaactcggcattttgaataagaatcatgtcttcacctcttttatcactctttactatcataattcattgacttctgtccatcaattgcaaaatgagacggttcggacggacggagaatttttcctctttatatccagtgtagcggttcagacgatccttattcaagaatgactttttccctgcaaaaacggctccatcacaaaaaacccaaaacctgcggcgttttgggttttttcggcttatcttatgcttgggcctggcgttttttagacgcttcgttcacttgttcatccgcatggtaggaagaacggacaagcgggcctgcttcacagtggctgaagcctttttgcatcgcgatttctttcagttcggcaaattcgtccggatgataatatttttggacttttaaatgttttttcgacggctgcaggtattggccgatcgccatgatgtcgacattgttcgcaagcaggtcgtccatcacttcaataatttcttccttcgtttcgccgagaccgatcataatgcttgatttcgtcgggatgtcaggctgcatttctttcgcacggcgcaagaattccaaagaacggtcatatgttgcgcgggcccggactctcggtgtcaggcggcggacggtttcaatgttgtggttcagaatatcaggacgggtatccattaatgttttcaggttgtcgtaatttccgcccatatcggatggcagcacttcaattgtcgtgaacgggctttttctgcggatcgcccggaccgtttccgcaaagacgcctgctccgccgtctttctgatcatcacgcgctacggccgtgatgacggcgtgttttaaattcatcagcgcgacggaatcagctacgcgttccggttcctgcagatccagctcagtcggcagtcccgttttgacagcgcagaagcggcatgctctcgtacagacggaaccgagaatcatgaacgtcgccgtacgtctgacagcccagcattcatggatgttcgggcattttgcttcttcacatacggtatgcagattattttcacgcattaattttttcagacccgtatagttttcattcgtgttcagctttattttgagccattccggctttctcagatgctcgtctttctttgccatttccccatcatctccattatccctttattcatgttcgtgtgcgaaaaatttctatttcacgatggatataaaacttgcggatttctattcaatagtcactttaacataggaaaaatttctcgacaagggaagagaattacttacattttctcggattgttgccgcaaactatttgtattcaatcctgaaaggagatcatgttgtgaaagttctgttatctgctcttctccttttttcagttttctgtccggctgcaagcgggaaagaacaatcggctcctgtttacggcgaacggatgcagttgtaccgcaaagccgaagcagtcacgcagattccttggtatgtgcttgcggcggttgatcaatatgaagaaaatgtccgctcgaaccgaaaggatctgccggaaaaggcgggaatcatcagcatttatattccggatcatttgtggagcggccctgaaaatccaaatcctaaggacgatgcgcccctcagcattaaagtatttgacgggatcggcctggacggcgacggcgacggaaaagccgaggtaagcaatgatgaggacattctttatacatttgcacagtatttagcgggattcggaacggatcttgaccatatccgcatcggcctctggaattattaccgccgtgatcagacggtcggcattatcaccgaattcatgacactgtttaaaacgttcggccgccttgatctcggagagcacgcctttccgcttcccgtgaagacggattacagctaccgcagcacatggggcgccgcacggggtttcggcgggcgccggattcacgaaggaacggatctgttcgctcattacgggctccccgtcagatcgacctgctacggtattgttgaaatgaagggctggaaccgtttcggcggctggagaatcggcatcagggatatcaataacacgtatcattacttcgctcacctgaacggctttgcaaaaggtgtgcataaaggccagatcgtcaaacccggagaggtgatcggctctgtcggcagttccggatacggaccgccgggcaccgcgggaaaatttccgccgcatcttcactacgggatgtataaagataacggcagatcggaatggtcttttgatccgtatccccatttaagggcatgggaacgtaaagaaatccgcaggaaaaagtaaacacacagccgccaggaaagattgcggctgtgtgtttttatttatctttcttctgtttttcattcggcagctggacggaaggcgtcacacctgacccgccgcttccgttataaaactgcggcacctctccttgaatcgctttaatggagaccggaatattatttgtcacgactgatgtcttactggcaaacggaataatgaccttcacttttatttccacaaaaatactgatatcgatcagggcattgttaatgccgtacggctttatttttgttttcacatcagttaacgcatcaccgatcaggttaaagcgcacggggattttcggcccgagatttccgagaatgctgtttcccgtgacctgccctaagggaatatcgatcataatttcatcggccgttttcgcgtctttttccgtttcatgctgcttattgttcgactccgcttccttcagatgagcctgaagctgctttgtcactttcgccttcatactgttgaccatttgtgtattaaaatccatcgttgtgacttttccgttttcatccgttttcatatcgaccatatctttcacattgtcgctgtgagacatgtattcttcaatggattccgtaatgacctctgtcgccacccgtttggtttccatttcccctatgttcatcagcaccggtttgattgaggagttgatcatccaaaggctgatgaccgtcgatatgataaaaaaagcaaacgacagaagaagcacatatcgaaaaggcaaaggccctctcttgcgaagagcgctccggtatctaggcaagaaaaatccccccttacatatcacaatgtatgcttgtaaggggggacatagtattttattttcacacttaaaaagtcccgcttaccttcactcggatgtaatggaacggccggcggattctgacattacggctgccgcgcgagcttccaggcgagcagatcccttaaaaactccggcataaagtattgcttttcttttgaatcgcggatgtaagggaacagctttccgagtgtaaacatgtcgagaacggcaaccgagtatatccgctccggatcaatctcttctccgttcactttcacattgaggagatgcgtcacaccgtcttcaagaatgccggcctctgcctccgctccggcatataccatcctgcccatcacttccccgcggaagccgaggccttttatccgcagctgctccatttgttccgaggcggcctggctgattgtttcctgaagttctctgcctgaaagacgaacggccaccggattgatcggatgaggacagatacggtgcaggtcaagctttgtgacaggccccttctgtaaaggccccaaaataacgcctgaattcaccatgctgacttcacagccgcaccagcttttcagcgcttcggctaatagaagcgggaggggcgattcctcaaaccatttcacgccggcttcttcattcagattggcgacttgttcggagagcaggttttccgcttcccgttctttctctttcagaaaagccgccgtatcttcagattccccttgccaatcagccattttctgtacagatgcctgtttgctgataatggttcgtgattcactttctatcgtcagctcgacacagccgacatagttcccgtatttttccgcacatgcaagcaatacgccgtttatgtcctgtccgtcctcaagaaggtggtgcgtatgtgattcaagaatgacatcgatgcccggaaatttttccgctgcggcccggtcatcgatcaggcctaaatgagaaagcagaatgatgatgtccgctttgcccttgatatcgtcaagtgattcttgaatgcttttttccgcatccgtcaccgtccagccgagtttttgatagacgggataatacggcaccgtgacgcccagtatgccggcggtcatcccgtttttcagcgttttgatcacgtagggctcggcccattccggccgctgtccgtccgcgtcaaacaggttggacacaatgacgggaaacgcggcatgggtatataaatccgccagctcatcgtgaggcagcgtaattccttcattattcccgacggcagccgcatcgatctcaagccggtttaacaagtcgacattcgctttgccgaaggtcgcttccgttatcatttggaatcggtccatatgatcgccgatgtcgaatacgagtgtttcctccccgtctttttcatgttcatttctcttctgctcaatataatgtacgattttcggccaattttcgaaatggctgtgcaaatcattcgtatgatataaacggagcttctctaacataccatctctcctaccttttagctgaatatcccttgataaatcaattcacagccgatcaaaatcaagacgacccgcatgaaaagcacgatcgttttcgtctgcacccgcttattaacccacgcgcccattttgccgccgaaccacgcgcccggaacgaggcacagcgcatacagccaattgacatggccctctgcgatatgtgacacggaacccgtcacggaggataagaaaataatgagcattgacgtcgccacagccactttcggcgggaacaaaaataacagcatcatggccggaaccatcagagagccgccgccaatgccgaaaagaccgcccaataaaccgacgaaaaaggcaatcacgataccggtgaaaatacggtacgaatatgtataaagctcacccgattcatcctcatatgtccggatcatgcctttatgcgctttattgaccggttttgctttcgccttcagcattaatgtaatggaaatcaaaatcataaaaagtccgaaccagacggaaaacgtatgcgcattaaaaagtttagacaaatacgcgccgatgatgcttcccgggccggaaccgataaaaaagatcagtccgcttttgtagtcaacggttttatatttcatataggccagagttgatgacaggcccgtaaaaataatcaccaaaagggacgtgccgatggcagtctgcggtgttacgtcatggaaaaacggagtcatcgtgcttaaatagagcattgccggcacgatgataattcctcccccaagcccgatcaggctgccgaccgttcccgcgataaatcccaatataatcaaaataagataagacatgtgtcttgaaacctcttttctagctgaataggtcgagctgcttcggagcaagcccggtatatgagatatttaacatttcaagcatctcaagcccgttatcggcggcgtctccgcctgagttattgttgaagagcacatacagattgcgcgactgttttttcagctcctgaagattgtttttccaatctttgagctcctgtttgttatagcggtataaatatctgacctcacgccagttttgtccgccgtctggtttgatccagccctgcttgttccgcccgtgaaaacggacaagcgttttttcttcatccgttgctttcaggacggtcggaatgctgccctcgccgatttgcggctcgtcacatatgctgtgaatccagccttcctccttcataaaggaaagcgtctgttcgtaaaatagcggagaaaaccaagaccggttgcggaattcaagcgcgcacgggatatcgcccatctgctgcctgcaccatcttaaatatgcgacgttttctttcttgcagtcaaaccacggcgggaattggaacagcaccatggcaagctttccatgctctatatacggcgataatgacagcttaaacgcctcaaacatttcttccttcgattcaaagggaatatcgccgcgctgatgacccgtcattccttgatatgccttaatgacaaattgaaaagattccggcgtctctttgacccatctttcattattgcgggcgggctgtatcgcgtaaaagctcgcgtccagctcaacgatgggaaaatgggaggaatacgcctgcagtttttgcgggcccgctgttttcggcggatagatgctgtcatgatccccccaccccgtcagtccgatataaatcacaatccttcacctctcactctagtttatcacaggtgtttttctctttctttttccatgttttttctgaatgcacttttcaggaaccggtactgatgttcattggtgtccgaaaatgcctcatctctggaagaaagaatgtgctgatagacgatcggctctgaaaactgaccgctcgtgaaatcatatatctccccgtctattcggttataaaaatgccagcttgtgccggtttttgttttgagaatgtcaccgccgtaaacatcttggatgactaaagccgttacgccgcactggcctttggccgggcaatcttccgtccattttgtactggtcttgcgcgaccaggatgccgttaatatgttcaagatttgatcatacaatgtgttttactcctttttataaaaagataccacgagacccgctttccaaacgacaaaaaaagccgattctcatcagagaatcggctcttttatttcagaaggcttcaggaatgttccgaaagccccgctctgcttacggccgccatcctgatacacacagcgtcccttgctgtaggtcgcagcaattcggtatagaaaggtgcggccttcatacaggctttgcttatgtttggaaaacatcgtttcttttgtgacggtaaaaggttccggccggacaatggcaaaatcagcgtcaaatccttcttcaagccgtcctttattcgttaacccgaagcgcttggccggtgcttcggccgtccatcgggccacatgttcaaacggaatcccatgatcgatcgctaattgaatcatgccgagaagcgtaaattggcctccgctgatcccgccccacgacaggaacatattatcctcgcgtttcaaagacggatgacagggagaatgatccgaagacaccatatcaatcaggccctctgccaaaaccccgatcaattcctctttatcagcctctgagcggagcggcggagcgcatttggcggccgccccttttttgaggaagtcttcaaagctgaataataagtagtgcggacacgtttcaacggtgacatccaatccgtcttttttcgcctgctgaatggagagcacagcccgtttcgtgctgatatgtacaaaatgaagcgcgcatcccgtcgctcttgcatattcaatcgcccgctgcacagcctcgcattcggcctcttccggacgtgaggaagcgtaagcgcgggcatcaattttcccttggagcgcgtactcggcttccaggaatcgggtgagggcgtcgctttctgcgtgcagggccaaaatcttgccgcacgccgcgatttccttcattccctttaaaagagtccgttcatcggctgattgaaattcatccgttcccgacttagacagaaacgctttaaacccgattgcccccgcttctgccatcggccggatatgttcggtatacccgggcatcaaaccgccccaaagcgcaaaatcaaccgatgacttccgttcggcgatttccgcctttgccagcaggttttcaacagttaccgtcgaagggatgcagttaagcggcatatcaaaataagccgtacagccgccggcagccagcatgtttgagccggtttcaatgccttcccattcttcgcgtccgggttcattgaaatgcacgtgacaatcgactgcgcccggaaacacatacatgccgtccgcctgcaccacttgttccgcgttttcctcaatgccgggcccgatcaaggcgattttcccgtccttgacggcgatatcagcccgctctgttccgccttttcgcacagctttcgcaccctttacaattacgtcataggccattttatcttcctccctgtaaggatgacgattttctgtcagtttttatcacaacatgcgtctatgattgccagtttactgctactatgatcgtaatacatcagcaaaaccgctataatttttgatgatttttattcatattaaccaatggttgtctttagaacctgaaaggagattgactgatgaatatttatgacgtgatgaagattcccgcttatgagcgggcaacattaatcgcaggcaaatccggcggctggagggaggtgcagcacgtcaacatgatggatgcgccggacatcgctgattttttacataaaaacgaattgctcgtcaccacggcttaccacttgaaggaccgcccgcagctgttgaaagatttgatccgcctcatggcaaaacggggctgcgcgggactggggatcaagacgaagcgttatcttaatgtcattccgaaagatgccgcggaacttgccgaccggtatgaatttccgattattgagctgccggaagacatcaggctcggagatatcgtcaacgccacactgagccatattcttgatatgcgttcaaatgagctccagcaggccatttacgcccataaaaaattcacaaaccacatcatgagcggcaaggggctgcaatccctgcttaagaagctctcagacattctccggcttcccgtgctgcttttggatcagcatacaaaactcttatcatcgtcccaccgcatacccattgacacgtctttattgaaaaacatctgttattccctttccgggccttatttcacctgcttttccatgctgtccgacagaaaggcgtattctgtcctgccgattctgaatgttgaaaaaaactgcggttatctggtgattccggagctcgtgcagaccgctgataaaggcatgattttgacaattgaacaggcggccaacgtcatttcctttgaactgctgaaagaaaatgccgtcaaacaattcggcagacgggcgcgcaatgaatttttcagcaatttcatcgaccgctcgtttaccggccatgaagaaatcaaaagccgcgccaaagaattccggctccgctgggatcagaaatacatgtgcatttgcggaaaactcgaccgaaatgagaaaacgatcagctttaccgaaaatcagctcgtttccgatcatgtatttgatctgcttgaaggggagctgtcatcctttccgtttccccctcatctctttattaaaggaaatgtcggtattcttttaattgaagcgacagacagctggaatgaaatgcacgcgtctgtcatcagctttttggagcagtttcaaaagcaggtccggacgcaatttaaacggactgtctccttcggcatctcaaacatatgccaaaagctgatcgacgtccctgacgcttttactgaagcttcagacgccatttcatccgggcatttgtccagaagcgcggagtttattcaaatctatcatgccaaagacgtgccggagctgctccgcctgcttccggcggaagatgtgaagaaattttacgaagccaccctccaaagcctggccgaccggcaaaaggaggaccagagcctgcttcatacgctgtctgtttatctggagacccactgccagatttcagaaacggctaagcgcctgtacgtccatcgaaatacggtgatctatcgtttagaaaaatgcgaggaactgctctgcaaaagcttaaaagatccggagacgacgatgcgcctgcggctcgcgctgagaatgcagcggctgatcggttaagaaatcgttagagacagggatgcgggtgttctctcgcatcctatttaagggggattgattcagcttaatcctcaaaaaatgctgccatcaacatctgcttccgttgatattatcaggctttttcgatatccgggatgtaaccgataatctcacccttttaaatcgcatcctaaactgcctcgggagcctttgtcacaagcacccatgatccttttttgatggtttcgccattcatttaaaaatcagcggggaacgacataagactcaaccacttcaccaacgccgccatgaaagtcatgttgcttttcaatttcatgagcatctttcaagaaaccttgagcggaccttctcaatttctgcaactgtcatgacatcctcgtgagcatccactgtgtccggctcataaacgataccgtaaacaagtttttgtgcgtctgcttctttcacaaggatctttacttccttgtaaaagttcggatgtttctttgatttcaaaatgagtattttctcctgttccgagtaggagaacgtccttcatatacatattttgtaaattaactttgaaggagattgatttaaagtgtattattattacccacaatatcaacttgttccaattccatgtgattaccgttactatcctcaaaaccaacctgaagactttcctgaagacacagatattagacaattttcacctaatacttttattagagcttcaatagaaggattatttcctgataaaagaagaatttacattcaagatgcttggatgcaatatggtaaccaacgagttagaataatctatgcatctggcaatgacgtgcacagtgcaactgtctcaagtgaaaaaatagaaactgatattcaataccttcatcaacatagataatcaaatctcctcatctttttgaaactctatatcaagttctataagcttttttaagtcacccccagtgtctattcgaccatttttgacccactgtgcaatgcctgcactaacaatgtcccggtatttctcttttaattgactgatgttctctaacaacaggagaaggagattttctttttcgccatcaggatagtaacttatgttcgctttttctcttgtcatgatcacgctctcgacagggagctttctctgttgtgattgaagggtgttagcagcaccctctttttatccactaaattatttcaacaataaattcaccttgattagtaatgataagtggaagctctttactttttagatatgcagcgtttttctgcatttcaaaccgcctctgtgcaaagaatagtggtccttctattctttttgtgtgttcatcatttaaccccattagaaaatcagctacagaaattatataattttgaacaatttctgaatttctcggacaagcatatttataactagctaaaagttgtactgattttcggaattcttcaatattgtttcttcgaaatcctttttcattaatagcctcacaaactgcataaatgactccataaaacatagctctgggattattccctctttgaagaaaaggtagaagagacttttcatttttttcaacaacatatttagataattctaaaatcaagtttttataatcgcccttaaagacacctgcatctacaaaagtctctttctgactccaattctgaatatactttacttgggaaatattcttttcccataagtaattcatcagttgacacaaacttatttattatttcatcccatcctgaccatgtaatattgaagtaatcaattgaaggaatatatttatcaccgtcgtaagggatcatgatgtgaacttctgtttcacctgttgtatagtgatcccaaccagcgatccatactgtccttctatatgtgtttactatagaatcaaaccctaagtttttttctttaatttcttttagacaacttatcgtttcttttagtacttctagtattttatctgtagaggtcttatatgttggactatgtttagcattattgtatagtttccttaattcatgtagtgatgcttttaaatcctcagatagcccaaattttgaaagatcattaatgaggctgaaaaaattttctctatttctcttacttttataaatagattcctttaaaaatccctcaaggactgaaccgacatcttcaatataatttaatagatctctaatagtatgatgagttgctaaggtctgaagaacttcattataaacctgtgaaacggtatcaattacaatatctattttatacctcatgttagctactctcctttaatatcaactgatctacattatattaaaatcagtcacttaaaggacagaagttctatacaatttttagccattgcaaataaatctgttccgcaatcctctttatcatgataggtgggcgctcattcaacaaacatactgtttgttagcgcccataaaatcataatccaatgagaacgactgcattaagatgatattccgttcagagatatagtagggttcaccataacgtatgaagacagagttactggccaaagcaggcggcacaagactgtttttgaccaggacagtattgaaatgactttctttcccctctgtccttttcgttatatctcctatagtgatatctgacgggcgctgcttcacccatcgcctatatgttttagagttctctgtcagctttgatccctgaccttaaccggaatggattttattatcatattttaacctccaaacaaaaaagcatcccgtttacggatgcttaccctattattgtaaatttaatagagcttctgccgcagcctatccccaacgtggatcgttaacaacagtcgtaaacactttaagcaggccactctctccaatctcatagtttaaattttgatacgtagaaatgactttctcctaaaggaaagaggaaatgctcttttcctttttcacgcggagttttggctacgatgatacattctccgttcacagcggaaaaaatctctccaaaaaaggaggggtgcttccctccgtgaatcgtaatgaagcttcgtatgttggctaatggctgtctggataatggtctcgctgtcatcttggaaagatcacttacttctataagtctttctttttaacaaaaaccgcagatatagcagcagaaataactatccgctccgcttcttatgcactctctgtaacatggagaattataaaaaggagggcgtgcggaaacatagggggagctccctgaatgggtcaattgataggcccatggataagaattaaattcttgccgctgatacaaatggaatgacgggtaataatacaacattttcaactccttttccgtacaccatattgtacttaccgacaccctttttagatgattgtctcttgcataattgtgtgttggcctaattgcgggttttaatctgcaaaattcgtgcaggggaaccatcacaaaatcacccgagagagcttttataagaccaccactccttaatgtcaccaatagaccccttctgaacagttcgtattatttcaatgacccgttttatcagaatgctctccccctgcatacgaaacagcaagttccaaacactgctttttccttctcagcattttccgctcaatgatgtccccgcctgactgccttcttttttgatcaacttccggcagatcaaattcgtcagactcgtcaagcgataaagctggttttcctttatctacatctgttccggtttccattcgcgctatgcttgagcatacggaacaactgatttccctataattccaatggcgttcgatatgattttccttctatgcgcatctctgcaatttcagagatgcgagccaaagaataaacggcaatcagcaaaaagcctccggatccccggaggcttttgattctatccttgctgcgtgaacggccgggtctgtgtctttttgccccagccaagcgcggccagaaaactgatggcgagaatggccgcccccagcatatacggaaattccatatttacatcaaagagaaaaccggcggctgacggtccggcgatattcgctaagctgatgaatgaggtgttcatcccgccggcaaacccctgctggtcaccggcgagcttcgacagcatcgtattaaccgccggccggagcagcgatgtcagcgtcaggaaaaagattgctgcggcaaaaacggcccaatatgaacccgcaaaccggcaccacacaagtcctgcagcagccccgatcaacgtcacgttaatcacgcgtttttccccgaacttgcggacgagataactgacgccgaccgcctgcacaaacacgccgatgagacccgcggccgtaataataaaggcaatatcagacgctttaaatccgtgtttatggtcaacgtaaaggccgaaaacagattcaaagttcataattccgaagttcagcacaaaaaccagaatcagcataaacgcgaacggcgatttgagcgcgcgtgacatttgcttaaacagatgctcacgtttttccgtttttgcccgggcttccagctgcttttcacgccccagcgtttcgggcagaaagaaaaatgaaagcacacttgaaaagcaggcaagacttgcagacacgatgaacggcacagacatgccgtaatgaaccaaatagcctccgacaccgggcccgatgacgacaccaagcgtcatcgccgcgctgaacagccccattcctttcccgcgttcttcttcggtcgtaatatccgcaatgtaagcgaacattgacggcattaaaaacgccgcgcccattccgcccaaaaggcgggatgcgaacaattgccagaggcttccggcaaaggcgaagatcaattgtgacacggcaaaggcggcgatgccgaaaataatcagtttccgccgtccgtatttgtcggttatttccccggcaataggcgcaaataaaagctgtgtaagccccgccgccgcaacaagcagacccatcgtgctgcccgtcgctccgaattcggtaatataagtgggcataatcggaataatcaatccgattccaagcatcgcaataaacatattcagcattaaaattgacaatcggcctatgtacgccatgatttcttaccttctccccagacaaacagatgatcattccatatttgtcattttttataccaatcagtataacgggcaaaagggaaaaaagtccagatgatttcaatctcgttttcaagtctcatgacagcacaccggtttcagccggcagatcatatatgttaagggccgcctgcagcgcttccccggctttaacggcaactccgtgtctgatcagaaccgcttcaagtccggccagcacaaacagcacattttccttcctgcagctgtagcccatcgttccgattcgccaaattttcccctgcagcggaccgaacgagctggcgatttcaattccgaattgagacaaaagcatacttctgatcgattcgccgtctgcttccggcggaatcttcacacatgtgacgacaggcagcttcgcctccggatcgccgaataaatcaaggcccatcgctgcaagtcccgccgtaagcgctttttcatgacgccgatgcctgcggaaccgttcttcaagtccttcttccaggacaaggcgcacaccctcccgcagcgcataaagcattgctgtcgcttctgtatggtgattcagccttctttcactccaataatcttcgagctggctcagatcaaaatagttgctcgtaaccggccgatgaccggacagccttttgccgtcggctgccgtcgcaatgccccgttctacctttttacgcgcggcaatgacagctgccgtccggtcattataagtaatcggcgccattccggaagggaccgacaggcatttttgcgttcccccgatgactgcgtcaatcttccattcatccgtttttacggcgcagcctccgatcgtggccacggcatccacgataaagagtgcgtcttgggcgcggcacgcttccccgatttctttcagcgggtgaatccgccccgttgatgtttctccgtgcaccatagcaacgattttcggggaaatctttttcatctcgctgataatctcttcaggccggaagaccgttccccattcacactcgatcgtatgaacgtccgcttcgtaccgctcggcgatttcagtcagcaggtatccgaagcgtccgtatatcggaacgagcacgctgtcgcccggttctatcacacttgcgagaacagcctcaatccccgctcttgatgtaccgtcaatcggataggcccagcggttttccgtttgaaacaattcacggagcatttgcatcgtttcgttcatgatgccggtaaatgccgggtcaaactggccgatgatcggagcgcccatcgccctcagcactctcggttcagcttctgtcggtcccggtgtcataatcgttctttgcggaatgcacaattcttttctggtcggcacgccgattccccctttacgttaataggcaagtttatgtaatacattcgccagcgtaaggacgccggtttcaagctgatgtacgggtgtgaattcaagcggcgagtggctgatcccgccacggctcggcacaaacagcatgcaggccggaaaggttctgccgagcatctgggcgtcatgtcccgctccgcttacgatcttctccgggttcgccccctgctcttttgcagcctctgctgcggtttgtgtcagtgtctgatccatttgaaccggctctatcctcatatattcatcaataacaggtctgactcctttgctgcggctgatgttttcaacaatcgacaccagtttctgatggaaggctgccagcacgtcttcctccgggtggcgaatatcaacggaaaactggatacggcccggaatgacattcgccatattcggctcaaccgtcattttcccgcacgtcaggcggagctcttccggctgtctttccgctgagagcatgagttcgtggatgatgctgcttcccgccgcgagcgggtctttccgccatttcattgaagtggtgccggcatggttgcattcaccgtcaagcgtaacggtatagcgtctctgtccggcaatcccggtgacaatcccgatatcccttcccgatcgttcaagcgtttgcccctgttcaatatgaatttccagaaaggcactaatatcagtgcgcagcggtgctggataacggcctgcaccgaagccgttctgccgcatggcttctttcagagaaatgccggacgcgtctttcggcgtttccgcatctgaaagcgagaaagcaccggtgatattgccggagccccaataagtgatgggaaaacggctcccttcctcttcacaaagcgacacagcctccagcgtttttttcggacgcccgcacgtctcatgcaaatgacggatcgccagcatgcccgccagcacgccgaacgcaccgtcatatttgccgccgtcaataacggtgtcaatatgcgacccggtcagaatcacctcatcaggcgattctgtgccgttcagccggccgaacacgtttccgacatcgtcaaatgccgtttccagcccgaacgcctccattttctttttgacggcaagctgggcgtccatccattctttcgtatataaaagcctcgtcactccgccggaagcggaagcgccgaattgagacagccattgtatgtcatcggaaatcccgatattcgccgccgaaagctgctgatgttccatacacgccctccttttaaactgaaaaactgacaagatgatcttcattatagaaggagcgcataacgagttcattatcatatcctctaaataatcaatgattttccggatactttgaccaataagccgaaggaaccatttttcaaaaaagatagaatattagatttattttttggataatagaggtaaaggagggcaagtcatgacaaaaaaactttggtttctgccgattgtctgcctgtttttcatttttggatgggccgcgccgtcagcctctgcgggcgcgccggctgacacgaatctgtacagccggatggcggtttcaactgccggcggcacaactctttttccgcaaactgcctcagctgtcatcactccgtctgcggatacggacacatattacaaagaagcttccggaaaaagcggaacggccttaaagagcgccctgcaccgcatcatcagcggacatacaaagctgtcttacagccaagtatggaatgcattgaaggaaactgacgaagatccggcaaacccgaacaatgtcatcttgctctacacccaggaatcacgggccaaaagtaaaaacggcggcagcgtcggggactggaaccgcgaacacgtgtgggcaaagtcacacggaaacttcggaacagctgccggcccagggacggacattcatcatctgcgccctgcagacgttcaggtgaacagtgccagaggaaatatggattttgataacggcggctcagaatacccgaaagcgccgggcaattattacgacggcgattcctgggagccgcgcgatgaggttaaaggagacgtcgcccgcatgctgttttacatggcggtgcgttatgaaggagaagacgggtatcccgaccttgagctgaatgataaaaccggaaacggctcagctccttacatgggaaaactgtccgttttgctcaaatggaatcaacaagaccccgtcgacagtaaggaaaaacggcggaacgaaatcatttacgaagactatcagcataaccgcaatccgtttatcgaccatccggaatgggcggacgaaatctggtaatcgtatcataagaagtgataagggagccccgatcatcaggctccctttttcaatatacggcgttttcagtgtcggcatcaaaaaagacggcccggttcatattgaccgcaagcagaatggcatcgccgggtttcacctgtgaagcgccgtcaagacggatcgtcatgcggtcatctccgctcaccgcatgaacgtacatctccgcgcctaagttttcacatacttccgccacagcgcggcacaccgcttcaggcgggtgctctgattgtccggcaagcgtcaaatgctccggacgcagccccgcaatcatctccttaccgctgtatcctttctgcacaagaacagccgctttttctttcggaatgggcagacgaacggacgaagcggcaaaataccattgcccgtgacttccttcaatgacgccttttataaaattcatactcggagaaccgataaaacccgccacaaacagattcgccggataatgataaatctcatgggggcttgcggcctgctgaatatctccttcattcatcacgacaatccggtcgcccattgtcatcgcttccgtctgatcatgcgtcacataaacgatggtcgctttcaaacgctgatggagcttgctgatttcggcgcgcatcgtcactcgcaatttcgcatctaagttggaaagcggctcgtccatcagaaacactttcggctcccgcacgatcgaccggccgagcgcaacccgctgccgttgcccgcctgagagagccttcggtttccgctggagcagatgcccgatttccaaaatatcggcggccgtccggactcgctctgcgatttcttttttcggcagctttctgagcttcaaaccgaacgccatattatcaaacaccgtcatgtggggatacagcgcgtaattctgaaaaaccatcgcgatatcgcgatctttcgggggcagatcgttcaccgcgtctccatcgatataaagcttcccctcagaaatgctctccagtccggcaatcattctgagtgtcgtagatttgccgcagccggagggaccgactagcaccagcagctcctcatcttttacatctaagtgaaaatccttcactgccgccgattgggcgccgtatgtttttttgatatggtcaaatgttaatgatgccattcgaaacctcctccaatactggaaaccgccacatctttctgttatgttaaaaatgttcggggtttctgacagattcataaatgaaaagcaaatttgtattataacgtcataatacatataatagtactactacttgacaaaggaggtccgtcccattgttaaataacgggagctcgaaacctttatatattcagctgaaacaaattatcgcggacgatatcaagaagggcgtttattcgccgtccgtgaaactgccgaccgaaaatgagctgtgcgaaacgtacaacgtcagccgcataacggtcaggaaggccatccttgatcttgtggaagaaggctggctcgtccggcagcagggaaagggaacgttcgttaaaagccctaaactgaagcgggagctcatcgcggtcaacggctactctgaatttatggaatcaacggggaaaaaaccgaaacaccagatcctttcccatgaaatcattgaagcgcctaaatccatcgcccaaaaacttcgcgtcgcttccgaaagtcccgttcttgaattaaaacgcattttatttcacgacgaccagccgctctcattcgaaatcgcccactatccgctcagtttatttcccgacatcggcaagcatattaaaggcggcgtgtcgatgcatgacattttgaaacagcactatcaggtggtgcccacccataatacgaagctgttaaatgtcgtatacgccaagcaggaagaaagccgctatctggcttgtgatatcggggatgcgctttttgaaattgacaaaaccgcatttatgtcaaaagacaagccgatatacagctcgctgtttttaatgcataccgaccgcgtcacgtttaccattaacagtccctatgcgtaacaagtataaaaaacgagacaatgcttatcgtattctcgttttttcactgcttttcccgccgcccggcctgtagggatgcccgtaaccgaacgctccgaaccctccgcatgttttggcagccgtcccggcgcccgcagtaagcgctcgccgaatatcctgatgctcgaagaaatcggtaagaaacccggcgataaaagaatcacccgcgcccaatgtatctattatatcagctcttaccaccggctgatgatagacgcgttccccatccgataacaccgcgccatattctccccttgtcagacagacgattttcgctccgaaaccgcgggctttttcggcaagccgcatacattcactttcactcaaatcactcccggaaaaaaacgcatacgtcacgtacggacagaccgcttctaaataggcttcgtcacgttttacagagaagtcaaaggaaatcggcacatggccgctcagcatcgggaggtcacgttctatcctgctgtatacgctcgtatgcagcaaatcatgtccggcgataaatgagatgtcattctcctgaaaagcgagcgtcagacgagattgcacgccgcctttatttgatccggcaaatatcctgtcccctctttcatcaagcgtgacgaccgccatcccgttttctccgtatgcccggcggatcagatcggcattcaccttttccagtttcagcacattcaatacgtgatccgccgcttcatcactgccgagaatcccgatataagaagtttcgtggcctaagcgccgggcaagcacggctacgtttaacgcatttccgcccgggtaaaacgtctcctgatcctgataataatctactacattatctccggccgctatcagtttcatcttttcatcctccttatccttttacgcttcccgctgcaatgccgcggataaaatatctctgcatcaataaaaacagcgcgatgatcggagcagcagaaatcgtcagcccggccagcagcacgccccaatccgtctgcagcgcatctctgaactgcatcagcccggccggaatcgtccgtaaattttcatcatcgataaaaataatcgcaaacataaactcattccatgtatggtaagccgtcaaaatgcctgatgtcaccagaatcggcacgctcataggtaagaatattctgaaaaatattccgaaacttgtacatccatccagataggcagcttcctcaagctctttggaaatcgacaaaaaataggaacggatcagaatcacggtaaacggaatacggtaggcggcgtacggaagaatcaatgcccaatacgtattgtacagtcccaatgactggataatggagtacagcggcacaagactgacctgcggcgtcagcatcaagccgccaagacaaatgatcagcacaaacccttttcctttaaattgaaaacgggccagcccgtatgccgcccaggcgctcacaaatacggtgatgagacaagtcagcacggtcacaatgacgctgttcataaaataagcggaaatcccttggttccatgcggatacgaagttttcgggatgccagacagagggcagcgaccagctgtgctcaaaaatctcatccgagcttttaaaggcgctgaccgccatccataacagcggataagcaacggcaatgaggtagattaagagaaacagccacacagacgtttccccgacataccattttctcggttttccgcctgttctgacggcctgacgggcatgacgcaagtccgtcttttcaggaagcatcggctactcctcctttccggtcttaaagaatttcatctgaataagcgacagagcaagcgtcagcaaaagcaccaccgtcgcgatcgcagaagcgtagcccatcatatcctttgtaaaagcgctcttatacaaaaatgtgctcagcacttctgaagcattgcccggccctccgccggtcagaatatacggttcattaaatacggtaaatgcgccggtcagcgtcatcaccacggcaacaaacgacatttctttcgtctgcggcaccgtaatgtgaaaaaactgctggatttttccggctccgtccagctgcgccgattcatataattcagcgggaatgctctgaatcgagacaatgtacagcatggcgatgtaaccgacagactgccattgagacacaaaaatgacagacagcatagcggtgttttcatcgcccagccacgcccgggtcagttcatcaagtccgacggcttccagcagctgattcaagagaccgatttccgggttataaataaaatcaaacaacagcgcaataacggtcatggaaatgacaaccggaagaaaaaagaccgtgcggaaaaacggcgaccattttcttaccaatctgtcttccagcatggccgccagaattaagccgccgccaacctggcaaatcagcgatatgaccgcatacagcacattgttgcggagtgctgtaaaaaacacgggatcgtgaaacaggtcaatataatttttcaaaccgataaacgtcttttcgggttgaaatgagctccattcaaacagactgaaaaacacattctcaataatcggaatgtaaacgaacagcagaaaaatcagcgcgggcgcgagaaacagatacggaatgaaacgttttcggctgaccaaggaaatcctcatctcctttctccaaagaaatctgttctattcagatgacgctctgacctgacgcgccgctttctgcacggaattcatcacctcgcgcggtgtcattgtgccgccgagcatctgctgaacgcctgccgcatacacatcggcgatttcaacgtcaacgtccatatcaaaccacggcaccattgattcggcgcggacgatatcctgcacggcttcgcgctggatcggggtggaattgttttctgtcgccgttccttgaaccgcgctgtatttaccgacgtcttttatcagcttctctcccatttttttcgaggttaaaaactgaagaaattccatggcttctttcgggtgcttcgtttttgaggaaatcataaatccttccggagatccggtcagtgcacggggagatcccttttcgccgctgattttcgggaaaggaaacaagcccagattgaccggttcgacgagcttaatttctgccgtttccgcataaatcatcgccgctttgccgcttgtaaactgctggcgcacgtattcgtgatcaacggagttcacgtgctttgtaaagtacggcagaagttcctgaagcttttcaagcgctttgacatagccttcgtccgtaaactccccggtttccgggctgtaatccttcgcccgcgttttttcatccaccatacgctggttcagcgtcccgatataatgagaaatcgtccaaggcgcttttgtgccgaaactgatcggaatatatccgttctctttcaatttctcagagactgtgatcagttcatcccatgtcgccgggggcttcaaatgtaatgtatgaaaaatgtccttattataaaagaatgatttagcgtccatttgccacggaacgccgtactgttttccgtcatgcgtaaagggtttgatttgtgactgcacaagctgtgaggaccaatctttatcctgctgatagtaagacgacagatcgagggctttatctcctttgatgaatttataagcaaaccggtcgctccatgaaaagaaaatatcaggggggctcgttgttccgagcatgactttcaccttgtctttataagaatcgtttaagaccgcttccgtttggatatgaatatccggatgagcggcttcaaattctttgaccgcttcttcaaaatagcttttttccggctccttcggccacctgtgaaaaaacttcaaggtcacttttccgtcagaggaactgctttggcttgaacaggcggcggctgacagacatacggctaacagaacgaacaggcagatgagctttttcagatgcttttcctcctttgtcaccggactataacgttatatatcattatagtccggtgaaatataatgcgcgttcttaatattcgactttccacatgtaacgcctctggcttaacggatggttccttgcttccgccagcgcatccgcatagcttctgagcacccggtttaatacgagaggagccagatagccttttacagaatcgtcaattccggaaaaatcatatgctgccgcatcaagcacagtcagttttttgccgtatctttttgagaaggaaagcgcccgctcttcaaggggtcttgtttcgtctaagccgagcaggataataaatggaacggattcatcaatgatttcgaacggtccgtgaaaatattctccggcatgaatggcgtgggaatgaatccattgcatttccatgagaatgcagatgctgtaggagtaagcgacgccgtagttcgcaccgcttgccatcgtgtaaatgatatcttctttttcgtgggctttcgcgaatgcctttgcgtgatccgcttcttgtttaagcgctttgtcatatacggtctggagcttattgagtccgtcgatcgcctgctcaaacgcgggatggttttccagcacgtgtaaagcgccgaacacgatttgatacagaaccccgtaattcgtatttatcgcctgtgcattctcaccccagtcatacaccgcgacatattcggcttctttcgctagcggcgaatcaggctcaaaggtcatcgcaatcgtaagcgcgcctttttttctggcgaaaccggcggctttcaccgtttccggcgtattgcctgactgagaacataaaatcacgagagagttctctccgagctgaacgggattgcgctgaataaattcatttgaactgtagagatcagagctgatggctttcgcctctctgtcaaacacgtacttgctcggatacataatggctgaagaacccccgcaagcgacgaaaaagacgtggtcaatcgtttttcctttcagatcatccaagaaagcctgaactttgtgattcacttgtgcggcagtttgactcaaatccttcactcctcagtgttttattatataacgttatataacattatataacgttatattaatcgcaacaaaggtgcgttgtcaatcatattttctgaaatttctaaaatataaaataaacccgtcttatttcccgccctctcttgacctgacccttagagacacgtttagaatgaaaagcagggagtgattcagaatgaatataaaagaagccgcaaggcagacgggtctcacgaaaaaagccatcaaatattatgagcaggaaggtttaatcaccgtcagcaaaaaccctgataacggataccgtgagtattccgctcagaacgtgaatacgctgaaaatgattgccgccctccgaatgctggcactgtctgtaagcgatattaaagcgttcctcttagagggcagcagtctgcatgatatactgcgccggcagcatcaaaagctcagccggcagattgaagagcttgagcaggaacggaaactgactgaaatgctgatcaagcgcgtggaagatgcggaaaatgtcgattcaattctgcatgatatcggcgaggtcaaaatagatgaaccgaagtatatgggacttcagctgaaaaaactgttcccgggagatttcggagaatttatcgccgcgctgtttgaaccgttcctcgacttttctattgatacagatgagaaaaaaacgatatgggcggagcttattaaagtattggatgatatggaagaagttccggctgcacacccgatgatgcagctggtcggcaaggaggatccggctcagctccagcagcacaaagtccagcatgaccaatttatcgagcggattttggagagagaccccgccacttgggacactcataaaaacatcatcattcagcttgtgaaaagagtgcagacagatgaagaatacagggaaagcctgatcaaggtcggagaatccgcttctgatctgcccgcgctgaaggagggatcgcctttcagcaatcttcttcaaaagctcagccccaaatatgacacgtatgtgcgatttcagcttgaactgaaaaaagaagccgacgaggaactcggctttgattcagaagcatatttaaaagagatgcttcaatcaaaaaaacgctaaggttcgtttccttagcgttttctttcttcagcctcagtgctgcgcgttaatgcggtcaacgacattagcgatgagctgctcttttcctaagtcggaatcttcgtcaacgcttgctactgtcaaaatgatggccgctaccgcaagagcgatcgtctcaatggcggccgccgcgtttaaaaatacctatacagccgttgcgcattggccgatggccgttgattttcctttgtccatgctctttttgtcaaactcttctttcagcactttcgccataatctgcgaaccttgatcaatgacgctgttcactttctcataatcgccgctgtagaccgccgctttcaactctttaaaataatcccgcgatgactttttaatatcagcgatcacctgatcggaaacacccataagataaatactgaaactaatgaaatttttaacactaaaaaaagggagtgttcatatgtttttaatgaatgataaagtgctgtggggtgctgtagttctcgcctttattctgtcgattgtgttttatccgtttcttcctgctgatatggccattcactatgacgtgtcgaaccgtccgaatacatcaatcaataaaacggccggcgtcctgatttttcccgtgctcatgatgatctgcatgttattcagaaaaaaggtcgtccagctgttcctcatcgtttactgtctgctgatcgtgcatattgccgtgatgtggctggcactgtaaacataaagaaaaccggagcccttaagctccggtttttcttatttataaaatactttctcaatgttgtatttcgactgaagggtattgatcgcgtacgtttcgtaaatctccctttccatcggatcatttacgacacatacttcaattttatacacttcgtccctgtgatgtttaacaggcgacacattgtcttcaaaatgctttttgattctttgtcttaatttacgggctttcccgacaaacagcagctcatcatgaatgttataaaacataaagatgccgcctttgtctctcggaatttggtgaaaatcaatgaaaccgtaaatcgctttaatcgccggttcattctccgacggtgactgctgccgttccgtaatggttacatcaggagcaggaaggtttatttttatcaaatgggtcacgtcctcttattcattaaagctccatcctatcataagaatgcgccaaaagctattttttattcaagcgccccggacggatcataaaggcttacatcaatttccgtctgctgcccgagcgcgagtttcgccagttcagcccccagatacggcccgctcgtcagccctgaggcgcccagcccgttggcaacgaggagtccgctgatattcggcactttgccgatgacgggaagaaaaccgggagtaaacggcctgaaaccgactcttgtctctatcatagtactgtctgaaagccccggcgccacggttaatgctttgtcaaaaatctcgcggagaccgccggccgtcacccgcaaatccatgccggtatcgttttcatgagtcgcgcccgctatgattctgccgctgtcaaaggcgagaatgtattgatcgtttggaggcatgacgacgggccagccgcccgtctcctctccctgaagctctaaatgaacgatctgtgccttttggtatgatactgaaaagcggatgccgagcggctcaagcagctctctcgcccaagcgccggccgttacgagaacctggtcggcagtaagcgtgcgttctgcggttttcacaccgatgacggcaccgtcctctgtcaatattgacgcttcttcattgtaaacaatcgcgccgtgcttaacggccgcgtttaacagcgccttacgaagcgccctcccgttcacccgggccgcgccgctgacatgaaccgccccgtattcctccgacagcgcggggaacagcgccttcgtttcttccggagtcagtcttgtaatgtcaccgatttcaggggcgtcctctcttcttttataagctctttcctccatttggctgagttttttttcatccgtatggaggctgacagcaccgaccttttgataaccggtttctgtttctccatcagcttcaagctgctgtatcaattggttataatagcgggctccgccttttgcgatcgcataccatgcttgattgcggcgctgcgacagccacgggcagacgatccccgccgcggcgtcagtcgcctgccccgggtgtttccgatcaatgaccgttacatccgcaccggcctttgcgagatgataagccgcggacgcaccgagaatgccggctccgataattatataagacttcatgtgtaacaccttttctatctgttttgtcttatttattttaacaaatggagcgcccggttcctaccggagtcctgacagcgacaatgagttttgaaaacggaaacgtataataaaaggaatacgttcttgtgtgaaagccgttttcctcaagaattgctctgtattgtgatgtattttttatatctgacacggccaatgtgccgccaggcttcagcaccctcaccatttccgcaatcgcccgttccctctcttttctgcctgaaatgttgtgtacggtaaaatgcgaaatgacaaggtcaaacgttttatcaggaaacggcatggcttgcgcgagcccgtcatacaaatcaattttccgcgctccttctgcccgtctgttcttttcgaatgcgtctctcccgtttccgcccagatcccagcttgaccatttgtcaatcgctgagacgtcagcgcctttttgagccgcggcgatcgctaacagcccccgtcccgttccaatatcaagcaccttcatgtccggctttaaaccggaaagcgcaagaatgcgatggcggtgtaaaagtttaatggccgttgaatacaagagcatccaaagaccgagcaataaaaacaaggtgcccgtcagccagccccagtaaggaggaatcataccgcataacgtggctgcagcataaaggagcgcaagaaagataaatccaaacgctccataaggcgcatcaattccgtatcgtgttgtcatactgtcaagtcctttcaatatttatccaactattataccataatattcaaaagccgaaaggagatacgaccatgtgaaacgcggcattacatttaacatcccaaatcaattcggacggtttgcggcagatatattacaaccgttccccatctcttcctatacgtggtttatcggtgatggagaggcgtatactgaattcaaagaagacaccgatacagacctgtttccgcaaaatcagcgcatcattcagggtcaagaactccgtcagcgtctggaaggaaacccttattatatgatttttgctgaattgaaagctttcccgggcgggatggtaacggaaatcagtacgtacgaggagtatttggagagttcctgtgagcttgtgcttctcattgcagattgctcgtatgtaacgttatattgcaaagatccggatatgctcgaagccctttatcagcaggctgtacaatgcgggtttcaccgcgttgactatgttacagatgagaatgacgcgagaacgggattgtctgtctgatgaaggtgcgttctttttatgaagcacctgatagggcttaggattcaaaatattgacaaattcgtgtgttttaacaaaaaaacaaccccctcatgtatactgagtgcgtaacttacatatgaaaggggtatggcaatgaaaatcagcttgaagaaaaaagcagatttttggaagaagacggcggtttcgtcacttattttcaccatgttttttaccctgatgatgagcggtacggtttttgcggccgggctgaataaggatcagaagcgccgggcggaacagctgaccagcatctttgaaaacggaaagacggaaatccaatacggatatgttgaagcgttggatgacggaagaggttacacttgcgggcgggccggctttacgacggctaccggagatgcgctggaagtagtcgaagtatacacgaaagcggtgccgaataacaaattgaaaaagtatttgcctgaattgcggcgtcttgcgaaggacgaaagcgatgacatcagcaatctgaaaggattcgattctgcctggcgctcacttggcaatgataaagccttccgcgctgcccaggataaggtaaatgacagcttgtattatcagccggcgatgaaacgttcagaaaatgccggactgaaaacggccttggcaaaagcagtgatgtacgatacggtgattcagcatggcgacggggatgatccagactccttttatgccctgattaaacgcacgaacaaaaaaatgggcgggtcaccgaaagacggaactgacgagaagaaatggctcaataaattcttggatgtgcgctatgacgatctgatgaatccgtcagatgaggacacccaggatgaatggagagaatcggttgcccgtgtcgacgtttttcgcgatattgtcaaagagaagaactacaatttaaacgggccgattcatgtccggtcaagcgaatacggtaatttcactattcaataaacaaaaaaaccccgccatatggcggggttttactattaaccgatggagccttccatttcgaacttaatcaaacggttcatttcaactgcgtattccatcggaagttcttttgtgaatggttcgatgaagcccataacgatcatttctgttgcttcttcttcagaaataccgcggctcatcaagtagaaaagctgttcttcagaaacttttgatactttcgcttcgtgctccaatgaaatgttgtcgttcaggatttcattgtaagggattgtatcagaagtcgatttgttatccataatgagcgtatcacactcgatgtttgaacgggcgccgtccgcttttcgtccgaagtggacgataccgcggtatgttacttttccgccctgtttagaaatcgattttgatacgattgtggatgacgtattcggtgcaaggtgaatcattttcgcgcctgcgtcctgatgctgtcctttacccgcaagagcgatagaaagcgtcatgccgcgcgcgccttcacctttcagaatgacagccggatatttcatcgtcaatttagaaccgatgtttccgtcaacccattccatcgtcgcgttttcttcacaaaccgtacgtttcgttactaggttgtaaacgttgttcgcccagttttgaattgttgtataacggcagtagccgccttttttgacgatgatttcaacaaccgcgctgtgaagcgagtttgttgtgtacacaggagccgtacagccctctacgtaatgaacgcttgcttcttcgtcaacgatgatcagcgtacgttcgaactgacccatgttttcagagttgatgcggaagtaagcttgaagcggtgtttcaaccttcacgcctttaggcacgtagatgaaagatccgccggaccaaacagctgagttcagcgccgcaaacttgttatcagtcggcggaatgactttcgcccagtgctcgcggaaaatgtcttcattttctttcagcgcgctgtctgtgtctttgaagacgatgccttgctcttcaagatcttctttcatattgtggtaaacaacttcggattcgtactgtgcagaaacaccagcaaggtatttttgctcagcttcaggaataccgagtttgtcgaatgtctgtttaatttcctcaggcacttcatcccaagaacgctctgaacgctcagacggctttacgtaatacgtaatttcgtcaaagtttaaagagtttaaatccccgccccactgcggcatcggcatgttgtagaaatgctcaagagatttcaggcggaaatcaagcatccattgaggctcttctttcatgcgtgaaatttcttctacgatttcttttgtcaatccgcgctctgaacggaaaatggaaacgtccttatcgtgaaaaccgtacttgtattcaccaatttcaggcatttttttagccatccattttcactccaatcttttaattgccgcctttttcgccagcgactcctttttcaagtgctttccatgaaagggtggcacatttaatccgggccgggaatttcgaaacgccttgaagagcttcaatatccccgagatctatcgagtcgtcatactctttcccttgcatcatgtctgagaaaatcttagacatggaaagggcggtatcaatatcttttcctttaatcgcctgcgtcatcatggaagctgaagccatggagatagaacagccttccccttcaaacttcgcttcctgaacggtatcgccgtcaagcttcattgtcagtctgatccggtcgccgcaagtcgggttgttcatatcgacgacgatgctgtcatccaaaacccctttgttgcgcggatttttgtaatgatccatgatcacttgtctgtataatgtatctaaatttgcattaaaagacatttgtaaagtactcctttgtcttttggagggcttccgcgagcttatcgatctcttcctctgtattatacaggtaaaaactcgctctcgcagtagcagatacatccagccatttcatgagcggctgggcgcaatgatgtccggctctgaccgcaatgccctcagcatcgaggacagtcgcgacatcatgagggtgaacctcatcaagattaaatgtcacaagtcccgcccgctctttcggaccgtataccgtcacgccgtctagctgctcgaaacggtcaagcgcataggctgcaagcttatgctcatgccgggaaatctcgtcgagtccgatctcttcaagaaaatcaatcgcggctcccaatccgatcgcgcctgcgataatcggcgtgcctgcttcaaatttccacggaagctctttccaagttgattcataaagccctacaaagtcgatcatctcgccgccaaattcggccggctccatattctcaagcagttctttcttgccgtacagcacgccgattcccgtcgggccgcacattttatgggaagaaagcgcgaagaagtcgcaatccaagtcctgaacgtcgattttcatgtgcggtgtgctttgcgccccgtctaccacgatgaccgcgccattgtcatgagcgattttggcgatctctttaatcgggttgatcgtgccgagcacgtttgacacatgagcgactgccacgatcttcgtatggcttgtgacagtctgccggacgtcgtctaacgaaagcgtgccgtcttcctgcatcgggatatattttaaagtcgcgccggttgcttttactgcctgctgccacggaatgatattcgcatgatgctccatttgggtgatgaccacttcatcaccgggttttaagctggcgcgggcatagctcagcgccaccatattcagtgaagttgtcgtgccttttgtgaaaatgacctcagccattgatttcgcattgataaacttacggactttttcacgcgcaccttcatagccgtctgtcgctctcgtgccaagagtatgaacgcctctgtggacattggaattgtatttgctgtaatactgatccactgcttcaatgacagcacgcggcttctgagaagtcgccgcgctgtcaaggtacacgaggtcatgtccgttcacttgctgatgaaggatcgggaactgttcacgaatatcggtgatattcattattttactttcctttcgatgacggagacgagctgtttcttaactccttcaatcggaagctcttttaccaccggagcaaggaatccgtaaatgactaagcgctccgcttcttctttcggaattccgcggctcattaagtagtaaagctggatcgggtccacacggccgacagatgccgcatgtcctgcagttacatcgtcttcatcaattaaaagaatcgggtttgcatctccgcgtgctttttcactcagcatcagaacgcgggattcctgttcagcgtttgctttagacgcgccgtgctcgattttgccgattccgttaaagatggaagatgcggcatctttcatgactccatgcttcaggatatagccttcagaagccttaccgaagtggatgatctgcgtcgtaaagttttccgtctgttctcctcttccgacaactacggttttcgtatcgccgtatgtgccgtctccgtagaggtttgtcgtgttttcagaaatcgtgtcgccgtcgttcatcagtccgagcgcccactcgattctgctgtcgcgtccgcgcgcggctccgcggcggttgacgtatgttgtgacgcctgctgacaggttgtcaacggcgccgtacgtcacgctggcattatcacctgtgaccacttcactgataatgttgaatacagcttctttcggattcaccgtgctgatgtagttctcaacgtaagtgacggagctgtggtcttcagcgacgatcagcacgtggttgaacaatgccgtgtcattgctttcatgaacgtaaacggcctgaacaggcgtctccacctgaacgtttttaggaacataaaggaatgccccgccgttcattaatgctgcatgaagcgcagtcagtttatgttcgtcgaccttaacgccgtctttcatgaaatacttctcaacgaggtcgctgtgctcacgggcagccgttaagatgtccgtaaagatgacgcctttgtctttcagttctttggaaagagaaaggaaagcgggcgtttggtcacgctgcacatataacgttttgtcttcgttttcgatatcgatcagcgcttttgcttcatcagctaaatcttctaaagaagcaagcggcgcattttctactgtatgcttgttgaactttgtaaagttccaatttgtgatttttgttttatcaggcttaggcagcggcagatcgtcagctttttcaagagcctgtaagcgcaggtttttcagccaggcaggttcttgatgcttttcggaaaagcctttgacatattcctgatctacggatagtttcgtttccaatgtcatgattatccccctaacgcttacgcttcttggcctacagtttcgtcttcaatgcctagttcttgtttaatccagtcataaccttccgcttcaaggcgctgtgcaagctccgcgccgccggatttcactacgcgtccctgcatcataacgtgaacgacatcaggcgtgatgtagttcagaaggcgctggtagtgagtgatcattaagcaaccgaagttttcgctgcgcattctgttgattcctttagaaacgactttaagcgcatcgatatcaagacctgaatcgatctcgtcaagaatggcgattttcggctcgatcatcataagctgaaggatttcgttgcgttttttctccccgcctgagaaaccttcgttcaggtaacgctgcgccatttcagggtccatttcaaggaactccatgttttcgtccattttgcggatgaatttcataagagaaatttcatcgccttcttcacggcgtgcgttaatcgcagagcgaaggaaatcggcatttgtcacaccgctgatttcgcttgggtactgcatcgccaggaaaagacccgcctgagcgcgctcgtccacttccatttccagtacatccttgccgtcaagcgtgatgctgccttttgtaacttcgtatttcgggtgtcccataatcgctgctgagagcgtggatttaccggtaccgttcggccccatgacagcgtggaattcgccgccttttatttcaaggtttacaccttttaagatctcttttccttcgatttcaacgtgaagatccttgatcgttaatgttgaagcagccatatctatacctccaaaatatataatcattattctcaatttattctcattctaattttataacaaatgaaaagtaaatacaactttttatattacccggaacattcctaaagtttatcaaagatcaaggcgtaattaaagctgtttgaaacagaaaaagggcggaaatccacccttttttactgaccgattttctcattaagctgcgctgcgaggaacttgcttttttgatattcaagctccctctgccgttcgacttccatcctttttgaaagacgccgtccgtattcctcgtagccgatgccgtgtgacttctgcatcgctttttccatttcaggcgtatagtcaaggtccagtctctcgtggctggtgcagataatgaatcaatcccttcatctatttgtttctattgtaacaatgatccgctgctccggccaaagagagtgtgcccctgaatcctttcgaatgtgccggaatccggcgctcgctttatctgaaaaacggtattcacacgattgctctttctaatgcgtcgtatgtccgaattcctgaatgcactgctgcacgagggtcactccctgactgagagccgcgccgcccccgaatgccgccgcgacgccgatgacctcaaggatgttttcttctgtcgccccttggtcaaggcagcccttcgtatgataaatcatgcaaaattcatcttgagcgctgatgctgatgcccagagcgattaattgtttctctttttcagttaatgaatccgctgagaaacactgttcagtaaattcattaaacttccgccccatcatcggcattttttgctcgaatatgcctaaaccttctttatattgtttcaatgcgtcatgcacgcttttgccgttatcctggtattgagccactgccattccctccaataagttaaccttcctttttattatggacagttctccgattaatacccgaaaaaaaccccggatgattcatccggggttttcgttttattcagatacgggaagcacggctccgtcgtattttttctcaataaagtctttgattttcttagagtgaagcacttccataagcgctttgattttctctgatttttcgtcacctttgcgtacggcgatgatgtttgcgtacgggttgtttttcgttgattccacttgaatcgcatcttttaacggattcagtttgttttgaatcgcatagttgacgttaatgaagactgcatcgccttcttcttcattatatgctttcgccgttaattcaggggcgatttttttgaatgtcaggtttttcgggtttttcgtaatgtttttcgtagtggcttcaatcgcttttaccttcggatcaagtgtgatcagtccggctttttcaagcatcgccagcatacggccttgttcagcgacattgttagtcatgatgatggtcgcgcctttaggcaggtctttcagtgatttgtattttttcgtgtaaattccgaatggctcaaggtgaacggctccggcattcacgagtttgtaatctttattttctttcatttcctgttcaaggtaaggaacatgctggaagtagttcgcatccacttcattatcagctaacgctttgttgtacattttgtaatcgttcagcacttttacttttaatgtgtagcctttttccttcaagagcggttccgcttcttttaagatttcagcatgcggtgtttttgtcgcggcgacgacgatttcctttttatttgagccgtttgatccgcaggccgccaaaactcccgcgaacacaagcagcagcgcacttaatacaatctttttcactgtaaatcctcccttatcttttgtctattatatttgtaattacatcaccgataatctgaatgataaagacgatgatgagtataaatactgtcgctacaaacgttacatccgtattattggactggtagccttccacatatgcaaggtttccgagtccgcctgaaccgatggcgccggcaatggcggtagatccgatcagggcgatggccgtaacggtgatgcctgaaattaacgcaggcattgattcaggaatcagcactttgaagataatcgtcgatgtcttcgctcccattgatctggcagcttcgatgactcctttatcgacttcccgcagcgcaatttccgcaagacgggcgtaaaacggcgcggagccgataatcagcgccggcaatgcggcgttcggtcctaaaatcgatccgaccaaaatcttagtgaagccgagaagcagaataattaaaataagaaacggaatagacctgaaaatattaacgaccgccgcaatcacggtgttaatgattttattttcccataagcttcccttacccgttaaaaagagcagaagaccgagaatcgctccgatgacaaatgaaaaaactaatgcgatgaccgtcatataaagggtctcgtatgtggccgtccacagctcggttatatcaacgttcgggaaccatttttcaaacatttgtgatcacctctgcttctacctgtttgtctttgatgaaccggatcacgttttctacttctttttcctgaccgtcaatatgaatgaataaagaaccgtaggctccgtccttcgtctgtgaaattttcccctgcagaatattgacgtccacatcaaagtttcggatcatttccgtaatgaggggctgctcggcggcctgcccgacaaatgaaagctgaatcgtttttcctgtcgctgtttcctgcagaaaatgctggatggtttctttcgtctcctccggttctgtcacctgctgaacgaaacgcttggtcatcggttcgcgcgggtttctgaaaacttggagtacttcgccttcttcaacgactttcccgttttccatgacggcgactctgttgcagatttttcggatgacatgcatttcatgggtaatgagcacgatcgtcagaccgagtctgtcatttatatcggataaaagatccaaaattgaatcggtcgtctgcggatcgagcgctgatgtcgcttcatcgcacagaaggactttcggattattggcgagcgcccgggcgatgccgacacgctgcttttgaccgccgctcagctgcgacggataagatttttctttcccctctaatccgaccagtttaatcaattcatcagcgcggcggacccgttcgctttttttcacgccggcgatttccagcggaaacataatgttctcccggacggtgcgcgaccacagaaggttaaaatgctggaagatcatgctgatttcctggcgcgcttttctcagcccgcggctgcttactttatttaattccgtccccgcgacttccacggttcccgacgtcggcttttcaaggccgttcaggagacggattaaggaacttttaccagctccgctatatcctataattccaaatatttcgccctttttgatatcaagagtgacatcttggacagcattgacatccccatgcttcgctttgtaaatttttgaaacattttgaagatggatcaaagcaatcacccgccttacactattctaagaaatcttccgggtttctccgcaaaagaaaagcctttctgcaaaaatgagcagaaaggcttattgaaaaaggcctttctctcatctttcaaagcagaccgcttcgagtgaattggcaccatttcaacattgttgatggttgccgggcttcatagggcacttccctccacctctcttgataagagaaaacatatcgtattttcgtccggaaattcttactgtagaatagcacggcgaatgataaaaagtcaataaaataaatattggaagatattgtcacatagtagattggcagttacggccgtttactgattgcctgaaaaaatccgtttgtcagccagaggatggcctccagcttcagcagagctctgaatgatcctttcactttgagttttccgctttggataagcttttgcaaagagacatcaccatgcaggagatggatgatttccgtctggtttccgtaaaaggtcaaattagatttttcctttgaaaccgacgtttttctcatttctccctgtccgttaattgagaccgttaaggcttctgtttctccttggaatgtaatcagcagcgttgaggcgtttaatagcggtttcaaaaacagatgctgtccgtcattctctgaaacttctattttctccactcgtataacctcccgttttaatggccatacatacactttctctttttaacggacagaaccctttataaaccgcacgacattttcctgtaaatattgtcacatcgggaacgtttgcgatgttttttgtttaatcagctcatataaataggaaacggagcggaaggcgtatcctttctcaacaagctctccgcctttaaacagcaaaaagcacggaacgctttcaatctgataggctttggcgaaagcgggggaataattcacgttgtttttatagaaggcggcgccgggcagcatttcttcgacgacagtaagcattttggacgccagctggcatgtgccgcaaaacggggtgtacaaatacaggagataaacgtcatcctgaatcgattcgagttcattttcttggagttctttcatgattaccacctcaggtcgttctttttcaaaaatacagtgtcagcatcaaagccggctctgatcagcacagatgcgagatgatggcccgggcacgactcgacttgcctgtatgttctgtctatataaatatggcgcgcttcgggaagctcccgtttcagctgttttcttaatttttctccggagtcatctgcgtccgttaaaatatagacgtctctgtcaaagaggcggtccgccaaatcttccagttcggtttggccgatcgttccgtttgtacagacgatttccgcgggttcgatgagcacttccctgactttgattttatcagattttccttctacgataatgaccttttcatctccgttgtacataagcgcgtcacctgccgattgttttagcgtcagattgaaaaagaaggcagtgaaattcaccgccaactgttaacaccagccattctcataatcgcaatcgacatatttcggatcgctgctgtttatgacatcggctgttttataaaatttttgattttcaaatgaaaagccctgtttgagctcgtactgatccatgcctgtcatctcgccgatggcttcattttcatgaaataaggaaaaccggccgttttgaaagcggcccgtaacgttctccgtcacatcgaccttttgtttatcaaaagccattttagacacctcccgttacagatagaatgtccaaatggccccttcgctatccgatcagtcttcttgtgtcatttcgtcatattgctcggaagtcatgaggttttcgatttcttcagcatcagccggttccacgacgatcatccacgctttttcatacggagactcgtttacgaattcgggactgtcatcaagttcttcgttcacttccgtcaccgttccgttaatcggtgcgtacagttcggaaacggttttgacggattccacgctgccgaatggctcgtccgctttaatttcggcgccgacttccggaagctcgacaaagacgatgtcgccaagttcggcttgcgcgaaatgtgtaatcccgatgcgggcttttccgtcctcaactttgacccattcgtgctctttggaataacgcatatctttcggtgtgctcatctaaatccctccatttttttcttataataagaagataccataattctttgaacctggcattacatccaatatttttcgaattggtcttctttaaagccgacagtgactttttcgccgtctgtcgtaatcgggcgtttcaggagcataccgtctgatgccaggagttcgagctgttcatcctctgacatatggtacagtttttcctttaagttcagctcgcggtatttcattccgctcgtgttgaaaaactttttgagctcaagaccgctcttttcatagaggtctttaatttcttctttcgacggagtttcctccgcgatatgtatttcgtttatttccttaccgcggtcttccagccattttttcgcattacggcacgttccgcatttagggtaccagtaaaaatttaacgacatcttcttcaccccttgtaaatgatcgtcgttattttaacacaatcacttgtaaaaacctataacgttgcttcatgaaaaagcgcccctgatgaaggagcgctttcagcatgtgatcagaccgtatatttttcttcacggaagacggcggctgccgcttcacgttttttctgaatgaggtttttcggcgtcaggcgcgtcagtttgcgcagcacggaaagcatcatgcggagggaatctccttcctccatggcgatcagtgattctttggcgtgcgcttctatgttctgaagggcttcctgggcaaagatttccgtatataacagcttctgcgcggctttttcggcaccgtccgccgcaattgctttttccgttctgaggacggctgattccaaagcgtacagcgcgctgacaatatcggcaatgttcaccatgatttcctgctcgccttcgatctctttgccgtatttctgcgccgcgagacccgctgtcaagagggcgatctttttcgcctgtctgacaatgtatttttcctgttcaagaggttctgagcccggctcttcaggcatcagcatcatgagttcttcttggagcgcttttgctttttcaaagagcggcagctgaccttttacggcttttttcaggaacgtgctcgtgacaatcaggcggttgatttcatttgtgccttcaaaaattctgttgattcttgagtcgcgataggcgcgctccacttcatattcctgcataaatccgtaaccgccgtgaatttgaacgccttcgtcggcaatataatcaagcgtttcagaaccgcacattttgttgagcgagcattcaatcgcgtactcggcgattgacttcgcgacttcgcgtccgtctttttgctcctcttccgtcagcctgctcatattatcttcgaataagcccactgttctgtatacagagctctccatcgcgtaaagccgagctgacatcgtcgcaagcttttcctgagtgagcgtgaagcttgagatcggcgttttaaattgccggcgctggtttgcataagcggcagacagctcaatcacccgttttgaagcgccgattgtgccgacggcaagcttgtagcgcccgatattcaggatattaaaagcgatgacatggccttttccgatttcgccgagaaggttttcttttgggacttccgcctgatctaaaatcagcgttcttgtcgatgaacccttaatccccatttttttctcttccggtcccgttgacacgcccggatagttcttttctacgataaatgcggaaaacttatctccgtccactttagcgtagacgacaaagacatctgcaaaggcggagtttgtaatccattgcttttctccgttaagaatatagtgtgtgcccgcttcattcaaaacagccgtggttttcgcgccgagggcatctgaacctgaaccgggctcagttaaggcgtatgccgcgattctttgtcctgaagccaagtccggcaaataggtttttttctgttcttccgttccgaagaacacgatcggcaatgagccgataccgacgtgagcgccgtaagacagcgaaaagctgccggcacgtgaaaacttttccgtaatgaaggctgaactgattttatccaggccgattccgccgtactcttcaggcacgtctgctccgaggaggccgagatctccggcttttttcagcagtctgaccgaatgctcgaactgatggttttcaatttcatcgatataaggaagcacatcgtttacgacatagtcttctgtcgttttaccgatcattttgtgttcgtctgtaaagtcctccggagtgaatatttgatcatatcccgtctcttcaatcagaaagctgccgccttttttgacgttgaccgtttcctgtttcatgttcgtttccccctttttttaaatgagttcaaatacgccggcagctcccatgccgcctccgatgcacatcgtcaccacgccgaattgctcgtttctccgtttcatttcatgaatgagtgacagggtcagcttcgttcccgtgcatccgagcggatgtccgagcgcgatggcgcctccgttgacgttcaccttttcttcatctatcccaagcgatctgatgacttgaatggcctgtgaagcaaaggcctcattcaattcaaaaagcccgatatcctgtaattcgagtccggcaagcttgagcgcccgcggaatggcttcaatcggaccgatccccattacctcaggcggaacgccgcctacggcaaaggaacggaatttgacaagcggcgccaatccgagcgacgaagctttttcgcgatccatcagcatgacagccgccgcgccgtcacttgtttgtgaagagttcccggccgtcacggttcccgttttagaaaaagccggacggagcttcgccaagacgtcagctgatgtgccgggacgaacgccttcatcttgagaaaagataaattgttttttccgcggcttatggtcatcaccgacttctgtcagcgatacttcaaccggcacgatctcgtcattgaatttgccttccttaagggcttttgcggcattctgatggctgcggacggcaaatgcatcctggtcttctctggatacgccgtacgtttcggcgacctgctccgctgtgtgccccatgctcatgtaatactcaggcgcatgctccgccaaagcgatattcgggcgggtcacatgccccatcatcggaacttgcgacatggattccgcaccgcccgcaatgacggtgtcacccgcgccgatcatgattttttcagcaccgtaagcgatggattggagcccggaagagcagtagcggttcaccgtaatggccggcaccgtatgaggaagccccgccagcgcaccgatattccgcgccatatttaatccttgttcggcttcaggtgttgcacatccgataattaagtcatcgatatttccttcatatccgcctgcccgtttcagcgtttcttttacacaaagcgcgcctaaatcatcaggacgaacggctgcaagcgatccttttttcgctttaccgaccggggttctcgcaccggccacaatgactgcttctctcataaacaccctcctagttccgtaaaggtttgcctttgacgagcatatgctgcattctcgcttgagatttcgcctcgccagcgaggcttaaaaaggcttctctttcaatctcgagtaaatattcttctgaaacctccgtgccgaacgggactcttccgccggcaatgacatgggccagcttcttcgcaatcttcatatcgtgatcggataaataacccgaccgtctcatttggtctgctccgagcagtaatgccgcacatccggtttccccggtgactttcacgtttttgcgggcaggcgggcggtatccgctgtcatataaggaagcagccagctgtttcgcatcgtgcagcaggtgatcctgattcatgctgatacggtctgccgcggacaaaatcttcatatcacgggcttcatgtgccgaaccggacactttggcaagcgcgattgtttcgaaggttttaatcgctgcgtccatcagttcacttccgccgtccaaataattcatgtacagctctttgtttcctccgccgcccggaataaggccgacgccggtttcaacaagacccatatacgattcgctcgccgcctgaacgcgtgccgccgggagacagacttccgtgccgccgccgagtgtcatcccaaatggcgccgcgacaacgggtttagcgctgtatttgatgttcagcatcgtctgctgaaaacggcggatgacaaaatcgacttccatgaagttatcatcctgagcttccatcaaaatcatcgcaaggtttgcccccgcgcagaaatgtctgccttggtttccgatgacaagacctttataattccgctccgtttcctcaagcgcattgtcaatcatctgaataatgtctaagccgatcgcgttgcttttcgtatgaaattccagcagcgcgacatcattgccgagatcaatcagacttgcgccgctgtttttactgatcacgccttttgtttcttttaacgtttgcaggctgatccgtttcggattttctttcacagccctgtattggccgtctgaatagtaaaatggtgttccgttttccttcatataaaatgtttcatggccctgatcaagcatttctttcacccagacggggagtgctgcgccttcttcttcgagccgctccgctgattttctgacgccgatggcatcccacatctcaaacgggccgagctcccatccgaagccccatttcatggcgtcgtcaatcgctttgatatcatcagcgatctcacctaaaagccgggctgagtataagagtgtttgcgatgtgatattccaaagcaggcgtccggcgcggtcatcagagtatataagcgctttcattttgcctttggcaccctttgcctgtttggcggcttctaaagcgggcgtctccattttcgagcgctcaccgtatgtcatggtcagcggatcgagttcatatattgttttaccttcttttttgtaaaaaccttggcctgatttgctgcccagccaattgtttttcaacatgtcattcataaattcaggaagcttaaacatgtctttttcagcgccgtcggctttatcatacacattttttgccacatgggcgaaagtatcaagccccacaacgtcaagggttctgaaggtcgcgcttttcggtctgccgatcaaaggcccggtcaccgtgtccacctcgccgatgcggcagccggaagaaagcatttctcttaccgtgaccagcaggccgtacgtaccgatgcggttggcgataaagttaggcgtgtcttttgcgatgacgacccctttcccgagcgtgttttctgcaaatgaagtcataaactccagcacgtcaggatctgtttcctgaatcggaatgatttccagaagctttaagtagcgggccggattaaagaaatgggttcctaagaaatgagctttaaaatcggcagatcggccttccgccatttttgtgacggagataccggacgtattgctcgacacgatgcttcccggtttccggtattcatcaacgattgagaaaatctgtttttttacgtcaagattttcgacgacgacttcaataatccaatcagcatccttcaattgagctgcgtcatcttccaaattccccgccgttatatagtcgagattggcagccgaagtcagcggcgccggtttttgcttcagcagcttttgcatggccgatcggctcagcctgctgcggacctccgggctttctaatgtcagcccttttttcatctcatcctttgtcagctcgtttggcacaatatcaagcagcaggacgggaattccgatgttagccaagtgcgcggcaattccggaccccataacgcctgatccgagaacggctgctttctttataaacttgtgcatgagtcatcccccttgaactttgaatgaatagtcattcattttttcggcaaaaaaaatgaaacccttttcttctttcatcttaaaagattttcaggatgacttcaatagcaaatatggaatttttttaaatttttctgcttccgcatgttccgtggcgcggacgggaaacttaaacccggaggtgaagggaatggtgcgagggagaaaagatccgtcttctgccgcagtgagcgcggccagcatgaaaggaaatgcgggaccgaagcaaaaatacggcggcggcaaacggacgagccaaaatcagcaatataaaaaagacaacatggaataacatgctgcggctgctttttggagcagccgttattttttgaagatccctttcagcacaaatgccgcatttgccgggcgctcggcaattcttctcatcaggtacccgtaccaatcggttccgtacgggacatacaccctcattctgtatccttcttcggcaagctccttctggcgctccgttctgatgccgtacagcatttggaattcaaactgctcccggggaatctgatgtttgctgatgagtgttttcgtataagaaatgatgtcatcatcatgtgtcgccaccgccgtttcatggccgctcaaaagctgcagcttaatcagctgctgaaaatgaagatcggttgcttttttatcagggaatgcaacggccgccgattctttataagcgccttttacaagcctgagccgcggcttgtatggcatcagaccgctgatgtcttcagctgcgcggtacaaataagcctgaatgacggtgccgagcatcgggaaatccggcttgcaccgcttatacagctcaagcgtacggctgcatcttgaatagtcctccatatcaatcgttacaggcacgcagcgttcttttgcctccgtcaatatgtctctgacatgctgttccgcgagcttctcggaaatatccagaccgatggatgttaatttcagcgacagctcacaatccagttgattctcggcaatcgcccggattgcttttttacattcttccgccgtccttttcgcatccttctctgaacccgcatattcacctagataatcaatcgaagccgacagccctttttggttcagccgctttaccgttttcacagcttccatgagtgtttcccctgcaacgaaccttcccgcaccgaagcggattccgtaagcctgggcgaattttgtaagcagtttatttttcgacaaaaataaacatatgctccgcagcaaggatgaactccctcctttttcttttattcgtgtatgaaatcccgatcgcagagaaagctaaaacacaaaagctatgcaaattgccaagatatcagttcatatatccatacagactctgatgtcaaagcaatgtattatattatcaagatattcaaacggttttaatgagtcacaaaaagagtcaataaaaatcactacttcttaaattgagttttcgagctataattccgcttctttgttaaattttgccccgaaaaacttttaatttatatttctttatccccttataatttgaaaatattccttaaaagataattgatttataatttacaatggcttatatttaaaattgataattcagtttattgaacgtatctattaagaaggaaaagcagaatttcaaaatgttaattctgctgaatttatctttgcctcacaaacatacctccaaagcattattatttctttctaatagctttacgatccttcatttttaaagatggcttctcttccctaacggaatttaaagaagggacctgcctgagttatccattcacctaattttgaagaatcactatgctcgaaacatatgaaaagagggaaccttcaagtggattcaacaggaaaatctaaacgtacacttttattaattggacttattatagccatgtttttttctgctctagacggaacaatcgtaggaacggttatgcctaagattgtaggagatctcggcggcctgagcatgatgacttggctgactacggcctacctattaacatctacctccatcgttccgatcgctggaaaacttgcagatctattaggccgccgggcagtatatgtggccgggctgattatattcatgattggctcttcactgtgcggcttggctgataatatgaaagaattaattgtgtttcgaggtttacaaggtcttggcggaggcattatgatgccgatggctatgattgtcattggagatttattcacaggcaaacagcgtgccagatttcaaggcgtatttggcggtatttacgctcttgcttctgtaatcggaccgcaaattgggggatggattgtagattctttcagctggcattgggtattttttatcaatttacccgtgggaatggtagctgtgttctttattgcgatgggattgcaggccagaaaatacacgggtccgattcattttgatttcatcgggatgtttacaatgattacgggtgtagtctgtttgctgcttacactcagtttcggcggaaaagaatttgactggttatcatggcagacattttgtctgttagctttggccactataagtattattagttttgtatttgcagaaaaaaaagctgaagaaccaattctgcctatacatcttctaaaaagcagaacttttatcttcctaaatttaatagggttctttatgagtattgggatgtttgcagcaatcaccttcgtccctttcttcatgcaaggaataatcggcatgagtgcatcagagtccgggacaatcatgatgccgatgatggtcgcaatgattatgtccagtattataggcgggcagctggtctttaaaatcggcattaaagctcagattatcacggggatggcaatcatatcctttgcctattttttattatccacattagaagctgacaccagcaaattaactgcaactacttatgtagctatcatcggcttcggtatgggccttgttatgcccattattactctggcacttcaagagagtttctctaaagaaacgctcggcgtggttacttcgtcaagccaatttttccgctctatcggaggtacgtttggaattacgattctgggagcagtgatgaatgccaagtcaggaaatatattaaccgataaattagttccttttttagacaatttcccaaaacaagaaaacgcattggcaactcatctcaaagacttgatcagcagcaatcctcaagtcctgctacagaggctattcagttctgattcattcgaacaatttccgcattctatagcaaagcacatcataccgatactgaagacagcgttaatggactctcttcgcagtgtatttttcgcagggcttatactattaattgccggagtattttctgcttttcttttaccaaaaataaaaataaccgaaagaaaagccggcactgatctagacaataaaccggcagctgaagtccaatcctagtgccgctgctgactttcgcatatattgaactgttaacatgaacaggcattatccgaaggtttattcttctgatagtgtctttttttattgtaaatattgatgtctctgctgcaaatcgtggttattttaatttacctgtatgaaatcccgatcgcagagaaagctaaaaagaacagaattgaaggaggcgtttatatgaacaatcaagagcagcacggaaacttgccgcctgccgtcatctcaacgaaagaccatttgtatcttgaggacatgctgaactggaatctgcttgccatgaaaaaagcgcattttatggcggaacactgccagaatcagacgttaaaacaagagcttgatcagatcggccggatgcatcagaagcattatcagcacatattgggccgcttgaaccccgatcaaggcggacagacaacaacaggctatatgcaataggaggacaatacatggaacagcaaaaccaaaaaatcacgaatccgcaaacgcccatgcccaatacggcgcaaatgaatgacagagacttggtgaatgagctgctgacgacggaaaaatacatcacggcttcatattgcacagctctgcacgagttcagccacgagtctctttaccaagatattcaggcgattttcgatgagtcacaaaaagcgcaaagaagattatacgatgtgatgtttcaaaatggctggtattccattgaagcagccgatactcaaaagcttcagcaatcgtatcagaagttccggcagaccattcagcagcagtctccctaccagcagtaaaacgaagaaggatttgatgttttcgacaagcatcaatcctttttttatttttgcacaaaaagattgacttgtcattaatccttatttatatttaactaatgttaattattttctcaaggaacaagatgaggaggagttatgaaaaacgcggatcaatatgtgtctgacatccagaaatctcttcagacgctgctgcaaaacatacagcctgaaatggtggaaagcatggcaaaacacgaggtgacgcctgcccaattatttgttttagccagcctgaaaaaacacgggagctgcaaagtttccgaaattgcggaacgcatggaggtaaagccgagcgcagtgacgctgatggccgaccgcctcgaacaaaaaggactcatcgtccgcaaacataaccagcaggacagacgcgtcatcgacatcagcctcaccaaaaaaggagaaacaaaattcgaagatgttgtggaaggacggaaagcgatactggcgcgaaacctatccgttctgactgacgatgaactgattcagtccgtgaacatcatccgcaaagtagcggaagccgccgagaaatacgcggctgagcaaaaagaaaacgaatagaaaagaggagctgccgaaacatgagcattgaaaagaaagatccaaaacgcacattattaataaccggcttaatcatcgccatgtttttctcagcccttgacggcaccatcgtaggaacggcgattcctaaaatcgtgggtgacctcgggggattaagcatgatgacgtggctgaccacggcatatcttttaacttcgacgacgatcgttccgattgcggggaaacttgcagatttattggggcgccgcgtcgtctatgtatcaggtttattgatttttatgggagcttccgcactgtgcggaatggccagcaacatgacggaactgattattttccgcggacttcagggaatcggcggcggtgtcatgatgccgatggctatgatcgtcatcggggatttgttcacagggaaacagcgtgccaagttccaagggcttttcggggcgatttacgggcttgcttccgtgatcggcccgcaaatcgggggctggattgttgactcattaaattggaaatgggttttctatatcaacctgcctgtcggaattttagccgtgatctttatcgcaagaggacttcaaggcagaaaacagaccgggccgattaactttgacatcgccggcattttcacaatgatcgtcggaatcgtcagcctcctcctcgcgctcagcttcggaggaaaggattacgcatggggctcttggcagattctcggtctctttgcgcttgcacttgccgggattgtcggattcattttcgctgaaatcaaagcaaaagaaccgattctgccgatgtacctgtttaaaaacagaacgtttaccgtactgaatctgatcggctttttcatgagtatcggcatgttcggcgccgttacgttcgttcctttctttatgcagggaattatcggagtcagcgccaccgcgtccggcacgattatgacgccgatgatggtatctatgattatcacaagtattatcggaggccagctggtttataagatcggtattaaaccgcaaatcatgatcggcatgctgatcatggccgtcggcttcttcttattaacgactttgcagctggatacaagcaagctcgcggctacatgctatatggccgtgatcggtctgggaatggggctcgtcatgccgcttctcacactcgctctgcaagaaacgttttcaaaagaagagctgggtgttgtgacctcttcaagccaatttttccggatgatcgggggaacgttcggcattacggtgctcggcgctgtcatgaatgccagatcaggaagccttttaaccgacagactggtgccttacttagactcactcccaaaacaggcaagtgcctttgccgcccagtttaaaggtatgattgacaagaatcctgaagggctgcttcaatccctattcagccaggaatcgattaagcagattccggccgcattttcttcccatatcgtgccggttttgaaaacgtcactgatggattcgcttcacagcgtgtttttcacaggcctggcctttatcgctgccggattgatcctcacgctgtttgttaaatcaattaaactgacaaacaaaaagacaggcaaacaagaagaaaaggcgaaagccgtttaacaaagaaaaatcccgcggatgccgcgggatttttttatatcatctgggcctccccgtttccgaatgaccagtcttccgccgcattgcctgagaggacgataaacacatcttcttttctgacgcccagcttttcgtgcagccggtcagccaaatgctgatagaatgcttgtttctgatgagttgttctggagtttttcaaagtaaagcggataaacatcagttcatcgctccgctctacttgaagatatgacggatcatagaaaaactcccctttttcgtgctgatgcaccacttgaaaatagtcatcatgcggaacatcaatcatctccgtcatggcggtgtgaataacagtgctcatttttttgagccaaagtccgctttttcctttctgtaaatggatctgtacaaacggcacatttctctctcctttcgtcacatcgtctggccgcaatcggctgttatgatttgtcccgtcagtgattcctgctccagcacagagcaaatcagttctccgatatcttccggagcggcgatccgttccagcggaaggcttccggcaagccggtacatcgtctcttcccgccccgtccaccatcttgttgcaacggctccgggcgcgacacagcatacacggatgtccggcgccagcgcatgggccaatgattttgtcaggccatgcacggccgctttggaaacggcatacggaagggaagaacccgctcccgtcaggccggcgatgctcccgacattcacaatagcacctgacttttgctttttcatatgaggcgctgccgctctggcgcaatgaaacatcccgtttacattgacagcaaataattcatcccatacttctttcgttgcagattccaaatcatgaagcggaatatgtctggtgatgctcgcattatttacgagtaaatcaaggcttccgaatcggctggccgcttcgttcaccatgtctctcgcctgtttgtctatagaaacgtccgcttgaatggtcatcgcgtgtccgcctgcttttattatgaattctgccgtttgttccgcttccgtttttgaatgtgaatagttaatgacaacagccgctccccgttttgctaaggccaggcacgccgctcttccgattcctgtaccgccgcctgtgaccagtgccgttttatgttgtaaattcatggcttcttctcctcttacgttcgatgttcatcagctgatatgtttattgtaatggagatgtgcattttcgtataatgattgttaaagatgtttcatatcacaaaaaatgatagcaaagagggagagatgacaatggaaagcggagatttgcggatttttcagatggtggcccgtgaaggttccattacaaaggcggctgcgcgtctcggctatgtgcagtcaaacgtgacggccagaatccgccagctggaagaagatttgaaaaccgagctgtttttccgccataaccgcgggatgacgctgtcttcaagcggcacggtgctcctccattatgcggatcaggtcgtcggtctgatagaagaagccaaaatggcgctcgcttcaacagacaagccgagcggaccgcttatgatcggctccacccagacaacagccgccgtcaggctgccaaaacttttagcctcttattatgagcggtatcctgatgtggagctgtcccttacgacaggacatacacaatatgtaaccgataaagttcttcgctatgaattggacggcgcatttatcggctgtcactttcatcatccggatttgcactccatcccggcctttgaagaagaagccgttgtcgtgactcccgctgccgtcaccgctatagaagaagcggtaaaaaagccgcttcttgtgtacagcacgggctgcacgtatcgtgacacattagagcggtggcttcattccattggaacggcgcatccggccattatggaattcggcacccttgaagcgattatcgggggagtgacagcggggctcggcattacgctgctcccgcgaagcgtaattactcagcacgccgcactaggcgcggttcggatatggaccattcccgaatctttcagcatgatgaaaacggaattcgtcacgcggaaggattcatatatgagctgtgcattacgggcctttattgattccttttcagcaaaaaaagcttccggcacctctctttgatgccggaagctttttattgtatttttctgtgctcttcattgagctgtttaatgtgctgtaccgcggctttgatgccctctttggcgtccaggctggattggttccaatgttttaccgttcagcaaatatctaattatgatcgaaaagaacaattgaaaaaaaccacgagatccgtatagcaaaacggctctaatagcaggcttaccaactaaaaacattaatttttaacagcgtgtcaaaggaagccggcattaaactaacaatcgcaagtacccaccccgcaacaagtgaaacgggaaatgaatgtaagcaacaagtttccccctcattacatcccttaaaagaaaacatcaaaagctggagaagggtgtcctttttcttatgccgctaacggtgcagttgagtaaggagtatgatgaaaccctttaataaaccttaaacatttcatagttatctttatagtacgacataataaagtcacgaaaatttcttaccgaagaagacaacagcttatgtctcatccaagataagccgactggatatgaagcagagtgatcagtcacttttataaaattcagccccaatgttctgcaaactgaaataggcagcaacgccaccccttgatccagctttataatctcgaccagtaaatgagaatctgcctcaaacgcaatatttggggtgaaaccggctttctcacaaagcgaggctgtaaaaccgctatactcttcattattagcaagggtaataaatggttcatcggcgacaaggcgtaaagaaatttctgttttacccgtaaatcggtggtttgagggcaaagccagaacaatatcttcatttaccagcacccaactctctatctcttcatcttgaatcggatgacctgttattcctaaatcaatgtcccctttttttaaacttgttatgatctcgcttttaactccgattgcttggagaatttttgattgaggggagcggttgatatattcactcatcagtcctgcaaggaatcttggattggaaatagatattctgatggtgtcagaaatttgatgttcctccaattgaatttccgtttgtgcattttcaatctcagtaaaaatcctgtttacatgttttaaaagaattttccctgctgaactcagcttaatatttctgccttttctctcaaacaaggttgttcccagttcattctcaagtctttttatagtgagacttaaagaaggctgggcaatctttaattgttctgccgctttagaaatatgttcagtataggcaactgtctgaaagtattttagctgcagcaattccatctgtctgcacccccttatttatttcaataaatatatatataccttattatgtattggattaaatgtaaatgcgaatgtaagataatagcatagttatagaaaaggaaagggtgtcattcaatgaaaattgatgtgaaagatatagcaaaaaatttaaatacgccactaacagcccctgcttatcctatcccaaattataaatttgttaaccgtgaatatttaaatattatttaccgaacggatgaaaaagctttacgtgcagcagtgccggaacctcttgaaattactgaacctttagtgaaattcgaagtgatgcggatgcccgatgtttccggacttggcgcctatacagaggctggacaagtcatccctgtcagctttaatggtgaagaaggagattatgtacattctatgtatgttgacaatttcccggctattgcaagcggacgggaacttactgcatatccaaagaaattgggtgcccctaagctgtatatagactctgatactcttgttggcacattggattatggcagtcttcgtgtggcaactgcgactatgggatataaacatttcgaaatggataaggaaaaagcgaaaagggaaatttgccgacctaattttatggttaagattgccactgattacaatggtgatttaagggtttgtgatttggtgcggacgcaaataacgaatatagaagttaaaggtgcctggactgggccggcgcggcttcaattatttgaacatgctctggcacctcttgcagatttccctgtattagaagtcgtttcagcatctcatatccttacagatttaaccttaaatgcagcacagccggtttataactacttagaggaaaaataaggagacgtttacaatgagaattgcagttttaggagcaggttctttaggaaccatagttggggcatatctgtctgctggcggaatggatgtcgaattgattgattcatacaaagaacatgtagatactctaaatcaaataggtgctaaagtagttggtacaacggaatttcaagcaaaggtgaaagccatcacccctgaaaacaaatcaggcaagtatgatttcatattactcctgacgaaacaattatataatgactccatccttaaagagttactgccttttttaaaggatgacagtgtagtatgttccttgcaaaacggtatacctgaacagaaagttgcttcgatcgttggtgatgaacgtgttattgcaggttctgttgaatttggtgctacgtttattgaaccaggcgtatccagacttacaactgagtatactcaatttaaagagtacgcttttcaaattggagaattacatggtgaaacaacagaaagaatccagcgtattaaatcggttttagaccttatcggcggaacacatatttccgataatttagttggaacgaagtggtcaaaattacttatcaataatgcattcagtggtttatcggctgcattaaacggagaatacggagacattcttgaccatgaaatcggcattgtcagcgcagtccatatcgcagatgagacgattaaggtgggacacgccaatggtgtcaaatttgcgaaaatgggcggccttgatttagaatctttggaattaagaagcgaaaatgatattcctgaacgtatccaaacatttaggtcagccatggaaccatctaggctgctaagagcaagtatgcttcaggatcttgagaaaaaacgcaaaacagaaattgattatattaatggagttattcccaaaatggcagaaggtactggaattccaacaccttttcatgatttggttgtagcacaagtcaaatgtgccgaggaatctcaaacagtgcccaattttgatacaaatataaaagcatttgaagagttattacgtatccgaaaggaaatgtgatatataggaaagagagaaagggattgctgcggcggtccttttttcttggttcagcaagcggaagaaatatacgttaacaaacgggtgcgttagttacattaaagttcttcgctatgaattgaacggcgcctttccttttcagaaaaaaagcttccggcacctctctttgatgccgaaagcttttttattgtttttttctgtgtgcttcattgagctgtttaatgtgctgtatcgcagctttgatgccctctttggcgtccgggtaggattgattccaatgtttgacgagcggaggcatgctttttgcgatatgtgtatacaaaatccactgcctgacttcttcctttacatccgggtttgtttcgccaagcaatagttccgtgtatttctcaagcaggccgtccagctgctgctgaagtttctcttccataccgttcccttccctttttcatgattatgacaatcgggcggtgagggccgcttcctgcacgatacatctgccgcgtccgtgcggaatgcaaagcggcgtgccgaacagcgggtcttgcgttacctggcagttcatcgcaaagacctgctgtacaagctcgcaagtgatgacttcttcgggacggccctctgcgtaaatctgtttatccttaatggcgaccagataatgggcataacggcatgccagattgaggtcgtgcagcaccatgacgattgtgcgtttttctttttcatttaattcaaacagcaaatcaagaatttcaatttgatgcgtcatgtcgagataggttgtcggctcgtcaagcagaatgatatccgtatcctgagcgagtgtcatcgcaatccatgcgcgctggcgctgtccgcctgacaaggaatccaccggacggtcggccatttcctcaagcttcgtcgctttaagcgcgtttgccactgcgtcttcgtcctctttggaccattgcttcagccagctttgataagggtatcttccctgcttcacaagctgatgcaccgtcaggccttcgggagctgacggactctgcggcaaaatagcgagctctcttgccacttccttcgtcggaagcttagcgatggcttttccttctaaaagcacagaaccgcccctcggtttcatcagccgggccaatgaacgtaaaagcgtcgattttccgcagccgttgcttccgatcaatacagttatttcgccttttggaatcgcgacatccaattcgtcaatgataacagtttctccgtaccctaagctcagcgtctctgtagaaattgcactcataccgctaaccgctccttttttgagtttcccaacactatgtatataaacaaattgcctaaacattcaacgtgagatcatgattatattgtaacagaaattaatgactctgaatatcattatcaattagttttgggcaaaaaagcagcggacggcggttatttttttatttctgtcatttctccgtcgttctttttcagtttcagataaaaatggtcatagcggctgtctaaattaaaagccgagagcacctgccggacgacctcgctttcctgcatccggctgtttacggcaagttctccgaggatcatcttcatttcatcaagcgcttcctcgccctctctgtgaacccctgagagcttgtcccggatgtccgccttttcatgaccgctttttctttcatacaaaccttcatagcggttatgctctccggctccgtagctgacgcgaagggaaaagctgctgtaaggaaccggcttcgcggatgacacgggtgtgctgtcttgttccgcttcccgtttttcttcattcaatcggcagccggcaatcagcatcagcgtaagacataaaacgcccgccgtcctgaaccatttcatgcgattcactcccattccattccgatcgtttttaggtatttccaagggaggcggctgtcattcattaaacaaaaaagaaccggagcggtaacactccggccggttcatctccagattatcattcagtcagctctaaaaattcctgcacatcctgtacagcaaggcggactgcgtcttcccaaaacgaccgttccgtcagatccgctccaaggtgcttcatcgccaaatcctcaacagtcatcgaagccgtgtcacacaaaagcgcgatatatttttcttcaaaatccgctttttcccgaagagctcttgcatatattccaagcgaaaataagtaaccgaacgtatacggaaagttgtaaaacggcactcccgtaatatgaaaatgcagttttgacgcccagaaatgagggtggtattcccctaatgaatcgcaaaacgcttctttctgcgccgcttccatcagttcattcagtttctcagccggaacgacgccctgcttgcgctcttcataaaaacgcgtttcaaataaaaatctcgcatgaatattcataaacatggctacgcttctttgaattttatcctcaagcaagaacagcttttcatcctttgtttccgcttgtttcaaagcggcgtcggcgacgatcatttccgcaaaggtcgaggctgtttcagcgacattcatagcgtaggctctgttcagctgccgcacttgaagcatggcctcctgatggaacgcgtgaccgagctcatgcgccagcgtcgatacattcgaagcgcttccggaaaacgtcataaaaatccgggattccccgctgtcgggaaagctggtgcagaaaccgccgacccgtttgccgctgcggtcttccgcttctatccaccgatcgcggaacgctttttccgtaaacgcggacagctttttgccaaacgtcgaaaattggctgacgatcagattggccgcttcatcaaatgtgtattctttcggagcctcgccgatcggcgcgtccacatcataccagttcagccgctcaagccctaaaagagatgcctttcgattcaggtattcggcaaaaggttttttatgatcggtaatgacctgccacatgacatccagcgtttcttttttcatccggttgatcgcaagcggctcttccaaagcgcttttccagccccgcgctttatagatttccgtgcggaagccggccagatggttcagcgtgctgccgaaaagctcctcttctcctttccaggcttcattaagctctttgaacacttggcgtctgatgcggcggtccgggtgcgccatcatattttccgcttggccgaccgacagctctttatcctcaaacggaatcttcattctgccgacagccgcattatacaggtcgccccatgcgtgatagccgtcaacggccaggccttcaatcagcctttcttccgaagcgctgagcttctctttgacacggtctcttctctcatttaaaacatatgtgagatcctgaagttccggtttttgcagcagctcctcccagacccgctcgtcaatccgggcaagtgtatcgtcaagggtgaccagagcggatttaaaatcactgctcagctgattaatccgcgccctccattcattcgctttctgatcatgagtgttctgagcctgaagacagccgacgaacgctcccgcctgcctgatcatgatcgctgaccgttcaaacctatcaatcagattgatcagctcccggctttcatccgcatgcgtcggaaccgtaaacgcttcaaccgcatgttgaaaagcgcttagatgatttttgagctcttgtatgtattgctgaaactcttccgaccggctcccgccctcaaaaatggagtttaaatcccatgtttccttcaatccctctaatgccatcttttctttacccctttctatccgaagctgactccattataaaacaattctgacatatttccgaacgatttctccttctttccgcgagatgttatacactatgagataagaacaaacggggaggattataagatgaacagaaaatttgccattgtaaccggcgcgacgagcggattcgggctgctgacagcgctgaagctcgcccggtcttatcacgtcatcgcaacagccagacagccggagaaagctgaaatactgaaagaggccgccgctcaagcgggtgcatccgaacatgttacggtcgtttctttagatgtgacaaatgaacagtcggtgtctgacttcgggaacaccatcagcggtttcggaccgattgacctgctcgtcaataacgccggcactgcgtacggggggtttattgacgatgtgctgatggaacattacagacagcagtatgaaacaaatgtattcggtctgattcacgtcacaaaaaccgtgctgccttatatgcgaaaacatggcgggaaaatcttcaatatcagcagtatcagcggactgaccggtttcccggctctatctccgtatgtctcttccaaattcgcggttgaagggtttacagagagcctgcgcctcgaactgctgcctttaggaattgatgccgctttaatagaaccgggctcctacaaaacatctatatgggaaacgtctctctccaatcatcttacggcacccggcaaagattcgccttattaccgctattatcagcaaatcgaagcttacttcaaagccaacgcatccaaaagcggcgatcctgatgacgtagcggagctgatttatcaattggcacaaaggaaacggctgaagaaactgcggtatccgatcggcaggggcgttaagctgacattggctttccgctcactctttccgtggtccgcctgggaatcgattataaagaaaaagctgttcacttaaacccaaattataattattataatttagtattgatttctatttaatacgtgatataattaaattatcagatcacagggaggacgatgaatatgaatacacaaaacgcgaaaaaaactgaaactcttgttgagaaatcaatgaacacacaattatcaaactggtttatcctttactctaaactgcaccgcttccattggtatgtaaaaggccctcatttctttacgcttcatgaaaaatttgaagagctgtataacgaagcggcggaaacggcggatgctatcgcagagcgtcttctggccatcggaggacagcctgcggcgactttacacacttaccttgaacaagcttccattacggatgaaggtcaggaaaaaacggcttctgaaatggtggaatcactggttcaagactataaacaaatcagccgcgaatcaaaatttgtcatcggcatcgccgaggaacaaaatgacccgtcaactgccgacctgtttgtcggattagttgaagaagcggacaagcatgtgtggatgctgtcagcctacttgggagaataacgaaaaaagctgaacctcagttgcaggttcagctttttttatgcgttcagcttgcgctttcggtttgtttcgttaatgtgacgttcagcgtctttttgcttccgcttctgagaacttgaacagtcgttttatcgccgattttcagctgattatataagatctgtctgatatcggcgctgctgccgacatctttgccgttcaattgtacaatgacgtcatttgatttgatgcccgctttcgcagccggcgagccggactgcacttcttttacgtaaacacccttagacagctggtcgccgaacagtccgagcgtgttttcctgataagtttccggcacttgcgccatgtcaatcatctgcacacctaaaaatgggcgctcgacttttccttttgcaagcagctggtcgactatcggttctacatcattgctcggaatggcaaagccgagtgattccacgccgttttcactgactttcatgctgttgatcccgataacttggccgcttgagttgattaacgggccgccgctgtttccggggttaatcgccgcatccgtctgaatcacgttcatttccactgtgccttgggatgtatcggcgtctaccgttctgttcagcccgctgatgacaccttgtgtgacggtgccggaaaactgctggccgagcgggttgccgatggcaatcactttatcggcaatgcggagcttggaggaatccccgaagctggccgcttttttgacattggacgagctgatttccaatacagccaagtcactgatggcatcctttccgacaagctttgccgtttcggttttcccattgtaaagagtgaccgacagtttgttcgcaccttctacgacatggttgtttgtaatgatgtacgctttttcgccgtcttttttgaagatgacgcctgaccccgtgccgctctccgtttcagagcttgaaccgccgtcaagtccgaactggctgctttgcgaagcttggtagttggacactccgacaatcgcaggctccaaagcttctaccatatccgctacgcttgaggtatttttcaaaggcgttgacgtaaaattcgaagactgaacttgtttcgtatcagaaacggcttctgtcttatgctgctcactcggcaggtttggcacaatgccaagcacgaggccgccgccgataatgccgcctaaaatcgggctcagccaagcggctctccgttttttttcttttttcacggcagccgttttttcaaattccgtaccggccgccgtctcgttttccgcttctttcgagacgggcccttcgagcagctcgggctcctgctgttcatttctgttttgttccgtatgtgaaagatctgactgatcgcggcttctgccgtcatctcgatgatcattcatattcacgcacactccttcagcatgttttcattctatcgattacatattcatcgcatgtacaagttctattgtcccaataataaggagaaaagcaaagctccaaaacaaaatgtgtttgaacatgttatcttccccgctttttttcttcctttcttcccttatacacatcataaacaaacattgtgggataaaaatgaaaagaatatgtgaaattatgaaaatgcggcttgagtatgttaaaactagtataatgacgttgaaaggatgtgaaatgccttgtcatacaccatttatctagttgaagatgaggataacctgaatgaactgctcacaaaatatttagagaatgaaggctggaacattacatctttcacaaaaggcgaagatgccagaaagcagatgcagccgtctccccacttgtggattcttgacatcatgcttccggatacggacggctatacattgataaaagaaataaaagaaaaagatcccgatgtgccggttattttcatttccgcgcgggatgccgatattgacagagtcctcgggttggagctcggaagcaatgattatatcgccaagccctttttgccgagagaacttattatacgggtccagaagctgctcgagctcgtgtataaagaacagcccgccgcaaagaaaaccggcatcaccgtttcttcctacaatgtgatcgaagatgcccgagaggtttatgatgaaaccggcagcctggtcaatttgacgtctaaggaatttgatctgctgcttttatttcttcaccataaaggacaccccttttccagggaagatatcctgctgaaaatatggggccatgattatttcggcactgaccgggtggtcgatgatcttgtgcggaggctgagaaaaaaaatgcccgggttaaaggttgagaccatttacggattcggctacaggatgatgacgtcatgaaaaataagccgcttgcttttcaaatatgggtggtcatctcaggcatcctcttagccatttcgattctgcttctcgtgctgttctcaaatacgctgcgtaattttttcacggatgaaacgtatacgaccattgaaaatgaacagcatgtactgacggagtaccggctgcccggatcgatcgagcggggatattacagcgaggatgcgaccgcgccgacgactttccgatccgttcagcacgttcttctgccgcaacgggaggaatcggccagtgacaaagacttgaactacttttcttcttcctttatccataaggtgtacaagctcgcgggccgccagcacagcgtcacgaaacgatacagcgcggatatcagcggtgaaaaagtatttttcgtcattaaaaaagggcttaccattaacggccaggatgcgatgatgctgtcttacgcccttgattcttatcgtgatgatctggcattcaccctgttcaagcagctgctctttatcattgccggcgtgattttgttaagctggattccggcgatttggcttgccaaatatctctcgcgcccgctcgtttccttagagaagcatgtcaaacggatttcaaaacaggattgggatgatccggtcatcgtcgacagaaaagacgaaatcggaaaattaggccataccattgaagacatgcggagcaagctggtgcaaaaggatgaaacggaaagaacgctcctgcaaaatatctctcatgatttaaaaacgcctgtcatggtgataaggggctatactcaatcaataaaggacgggatttttcctaagggggatctggaaaccacaattgatgtcattgaaggcgaagcagaaaaacttgagaagaaaattaaggatttattatatttaacgaagcttgattatttaatgaagcagcgggtgcaccatgagacatttgacattgtgaaggtcacggaagaagtcattgaacggctcaaatgggcccggaaggaattatcgtggaccgttgaaacagaagatgcattaataatgcccggtgatccggaacaatggagcaaacttcttgaaaacattctcgaaaatcaaatccgctatgcagaaacggcgattcacattcggatcagccaaaatcagcagcagattgtcatgacggttgaaaatgacgggcctccgattgaggatgagatgctatccagcttgtacgagccttttaataaagggaagaaaggcgagttcggcataggactcagcatcgtaaaacggattttaaccctgcataaagcatcaatttcaattgaaaatgaccaatcgggtgtaatctaccgaattatcataccaaagtagactgtagtgtttcattgcagtcttttttatgtgaaggaatagccgttaaaatctctgtagtttgctttcagcggtttttggcattgatgaacccatttcttttcacaaattgtctttttcggatatttcaccttttcgactttaattcctctgtttcgcaagcggctgatcatttcatctaattctttcattttcagattcaccctttcgccagaactttgaccattcggtcagctcactttataatataaataaaacaaaacaaaaaaacaagttacaatcaggttaaatttacggaatatcaatatgaccatatagtcatacatgagaagcacaagccagcctcctggctccgaaagggtggaaccattgaaggaaaaagaaaagctgatcattgaagcagcaattaaactgtttgcccgaaaagggtacaaatctacatcggttcaggaaatcgccgatgaatgcaaaatctcaaaaggcgctttttatctttactttccttccaaagaagcactgcttctatccatgctgaattactactatgataaaacgtttacccgaatcacgacgatccaaacggagggtgacagtccgagagccgcttaccaaaaacagcttgcggtgttttacgaatcgattctcgcccatcaggattttattaccgtgcagatgaaagacggttcacttccttataccgaagaagcggcgcagtgcggaaagagaatccgccggtcgatcctgcagtttcatatcgacagtcttcttgcgatttacggagaaaaagctgaaccatacacagccgagctttgttttttaatagaaggaatcagtcagatgtatcttgaatatctcattctgaccggccggtccgtacagccttcgcttttggcaaataccgtgattcacagaattgatgacatcgtaaacggaatggcggacagacatgatgaagcgtttatttctcttgatgaggcaagctcactgttcgggccccttcataacgggcagcccgatcctttaagccaatcgatcttgcagaccctccgtacgcgcatcggcacgatggacaagacgcaagcatctgaattcaccgagagcttggatattctggaagcggaaatgaagaaaaagtcgccgaaaccggcaatcatcaaaggaatgattttgaatttgaaggaatccgacctgctggctgaagatgcagaacagctcagatttttactgaaacagcagtttatttagaagaacggccgcaatgactgcagccgttctttctttttatgctttcgggtgcaccatatcttccggacgcaccatttcattaaattgttcttctgtcagaaggttcagctgtaatgccgcttctttcagcgtcaggccttctttgtgggcaagcttggcgattttcgcggcgttttcataaccgatgtgcgggttaagcgccgtaacaagcattaatgagttagagagattttcctgaatcgtctcttggttcggctcaataccgacagcgcatttgtcatggaaggaattcattccgtcactgagcagctgcacggtctgcaggaagttatagataataaccggtttgaagacattcagctcgaagtttccttggctggccgcaaatccgattgtcgcgtcatttcccatcacttgcgcggcgatcattgtcagcgcctcactttgcgtcgggttgactttgcccggcatgatagagcttcccggctcattttcaggaatgacgatttcgccgattccgcagcgcgggccgcttgccagccatctgacatcgttggcaatcttcatcaggtcggcagccaatgcttttaacgcgccgtgaacgtgagtgatttcatcatggcttgtgagcgcgtggaatttgttaggcgaactcttgaatgtctgccccgttacttttgtgatttcttccgcgacgaattcaccgaactgcggatgggcgttgattcccgtgccgactgccgtgcctccgatggcaagcgcgcggattttttccgttgactcaaggatcatttctttcgaacggtcaagcatgtatacccagccgctgatttcctgtccgagcgtcagcggagtggcgtcctgcaaatgcgtgcgtccgattttcacaatatcctgataagctttcgctttttcatcaagcgtcgcgcgcagctgatcaagcgccggaacgagctgctcatatacggcaagaaccgccgcaacgtgcatcgccgtcgggaatgtatcgtttgagctttggctgcggttgacgtcatcattcggatgaatcttcagctcggaatttttttctttcaataaagcagtcgcgcggttggccaccacttcattcatgttcatgttgctttgcgtgccgcttcccgtctgccagacaacgagcggaaagttatcgtcgtatttgccgtttaaaacatcgtcacatacagcggcaatcgcctgtgctttttcagactctaagttgccgaggcgttcgttggcgatcgctgtgcttcttttcaatattgcaaacgccttcacaacacgctgaggcattttttctgaaccgattttgaagttctctttgctgcgctgtgtctgagcgccccaaaatttatctgccggaactttaacttctcccatggtgtctttttcaattctgtaatccatttatgtatccctccataacagttgcttcaccctgagtattattcgccagtaacagatgaaaccctttttatttttcggccttggccgtttttaatttcagctcaagatagacgcgcgaatccttagagtatttatacttcggatttgttttacggtattctttcgacgtgtaagccacttcgtaatgcgcttcaaatgatttgatgagctgttcaatttcttcggcatttcctgccagtctgacttgtgccacatctctcctccgctttcataaaaaaacttgtaccattaaatactttatcatagtatatcatttttttaacaggaaaagataacctcaattaaggattggaaggcgggtgactgtcgatggcgcaatcggaattcaaggaatacatacacgttaatctggcactggtgcttccccacgtagagcagaatgatgacctggttcaaaataaaaagatgcttccgaacgggcttgttttttattatatgtatctgagtgaaatgaacgacgaagacaaaataaaagaggcgattgaaacgctgcttcgggaggaagacactctgacgctggatacggtgacgaaacgtcttgataagatcgacgcccgtcccgtctttacgtcgaaggaagccgtcatctccattctgcggggaaaatgcgccgtgtttattaacggacttgacagcgtatacattttgtccacgggaaaaagagaaaaaagaagcgtgaatgaacccacatccgaaaaggtcgtaagaggtccgaaaatcgccttcatagaagattctgatacaaacgtcgccatgatcaggcagcggacgaaccatccgaagctgaaaacgaaaaaggttccgatcggagaaaataagttaaaatacgccacggtcatgtacatagatgataaggcggacccgtcagtcgtcagcgatgttgtaaagcgcctcagcgatgtgaagatggacgacatccaggattccgggacgcttgaggagcttattgaggataataagtattcgccctttccgcaaatacaaaatacggaacggcctgataaagtctcttccgccttgttcaacggccgcgtcgccatccttgtcgacaactcgccgtttgcgctggtggttccggcttctttaggaattttaatgcagtctcccgatgattattatgaacggtggatttccgcctcgctcatccgggtgctgcggtttacgtctatttttattacgctgtttttttcgtccatttatatcgccctcgtttcgtttcaccaagggctgctgccgacgtcgcttgcagtcaccatcgcggcgaacagagaaaacgttcccttcccgcctattattgaagcgatggtaatggaaattacgatagagctgctgagagaagcgggcttgaggcttcccagcccgctcggccagacgatcggattggtgggcggagtcgtcatcggccaggcggccgttgaagcgaatattgtcagctccatcatggtcatcgtggtcagcattgtcgcgctcgcttcatttacggtgccgcagtacgggatgggtctgtcgttccgtgtgctccgtttcatttcgatgtttaccgcggcagctttcgggctgtacggcatgattttatttatgctggcgatctacactcatttatcgagacagcgaagcttcggttctccgtatttctcgccgaatggatttttcagcttaaaaaacgcaaacgactctattctccgtctccctattaaaaatcaaccaaaagaggcgaaaaacgtaaatgagccagaaaacaactcacaataagcttacaagctatcaagggacagcattgatttcaaacacgatgctcggcgcgggactcctcaccatgccgcgggcgctgtcatccagggcaaattcgccggacggctggatcgcgttatgtctggaaggcgtcatctttatctttttgatttatctcaatacgctcattatgaaaaagcatcagtacgggtcattatttgattatatgaatgaaggactcggcaaatgggcgggaaatatcgtcaatcttatgatctgtctctattttataggagtcgccagctttgaagcccgggcgatggcggaaatggtcaagttctttttattggaaagaacgcccgtgccggttacgctgtttatctttatcgcctgttccgtttatttaattatcggcggcatgagcgatctcggcaggctctttcctttctatttaacgattacgatcattattttgctggtggtgttttctttcagctttaaaatatttgatctggacaacctgcggccggtgctcggacaggggttttctcccgttatcgcctccttgaccgtcgtttcagtttccttcttgggaattgagattatgctgtttctccccgagtacctcaaaaataaaaagcacacattccgcatgtcggccatgggctttggcatcccgattattttatacatcattacgtacgttctcgtcgtcggcgccttaaccacacaggatgtcaaaacaatgatctggccaacgatcgcgctctttcaatcatttgaaatcaaagggctttttattgaaaggttcgagtcctttttgcttgttgtctggatcatccaatttttcgccacctatgtctcgtacgggtatttcgcgacatcaggcctgaataaaattttcgggctgaagcagaaaaagggcgtcatcttcgtaggcatcgcgacattcttggggtcattgatgccaaaggatgcgaacaagctgatgctgttcagtgatattctcggctatatcttcttggttttctttttgctgcctttactgatgtttggagtcgtcgctgtgaaaaggaaggtgaaaaaagcgcaatgaggacatacatcgtaatcatcctttgcacattgcttttggccggctgctgggacagccgcaatttagaagacttgagcctcgttatcggagtcgggctcgataaacccgaggaagaaaatgtggaagtgacacagcagattctggttccgcaaaaagcaagttcccagcagtcgtcgtcaggcgatacgacaaaggtgacttccactcccggggaaaccgtccatcaagctttaaggacggcatcgttaaaaaatcaccccgcattctcccagcacttgcgcatcatgctgttttccgaagcgctgttaaaggatcacatcccgcttgacgcattgatgaaccaatttatcagggacaacggtacaagaagaagctgcaatgtgatgacggtgccggataaaacgaaagatattttcaaaatcagtgaccagggagaacctgcgtcaaatacgatctatgacttaacggagaataatgcggtcaccatccggatgatggagcccgtgacattgggggaaatatcagagaaaatcgccaagggcgagacctttgcccttcctcaagtgcgccaagtgggcagcagactggaaatctggggcgctaccattattaaaaataaattctggtatgcgaatttaacgcctttacaagtccagaatatgaacctgttcacaggcacggtaaagggaggcgtcacgtttgcaaagcatgacaatcattatttatccttcgaagtattttccagcaaatataatgtaaaaacaatatataaacacggaaaattcaagtttatcgttacccggtttgttgaaggccgtctgtctgaggattggaacccgaaagaagattccttcaaagagtcctatataaatgaaatcaaaaacgcggtaaaacgcagcattcattcagatgtcatggcattcattgattacatgcagcatgagttgaaagtggatattaccgggttaggcgatcaagtccggattcattatcccgataaatggaaaaagatatcctctgactgggatcatcacttcagtgaatcggatattgaatacaaagtcaaagtcgccatcagggatttcggaacaaagggaatgtcccaatgaccccgtccctcgggagagtgtgctggcgccgctctccttttcttatgtcacgagatgattgcggtgggcatatacggctgcctgcgtgcggtcactgacatcaagctttgacaatatattcgtaatgtgggttttcaccgttttaatcgtaatgaacagctcttcaccaatctctttattcgtcttgccttccgcgacgagacagaggatttccagttctctttttgtcagcgtttcatgcggaagctgattctctgaatggcgcagccttgacagcacttttcccgccaccttcgattcaagcttcggttcgcccttggcagccgctctgatggcttcggctatttctgccgccttggacgttttcagcaaatagctgagcgctcccgcttcgatcaccggatacactttgtcgtcatcaatgaagctcgtcagcacgatgattttcggatcattgagtgtcgcgcagatctgttttgtcgcttcgatgccgtccatgccgtccatgacaaggtccattaaaatcacatccggcaaaagctttgcggccagatcgacgccctgctgcccgtctgatgcttcaccggcgacttcaatgtccggctgtgcttctaaaaatgcggccagacccatcctgaccatttcatgatcatcaatcagtaacactcgaatcactgtcgttctctccttttgttttctgataaatcgggactttcacgtcgatctgcgtgccttttccctttacggagataatttccgctatgccgccgatttcactcgctctttccttgatggaatgcaggccgtatgaggatgctttcacttgatccatcgtaaaacccgccccgttatcaatgactttaagctgcagtttttgatgtttcgcgccgagcctgacggtgaccttggtcgcctttgaatgtctgaaaacgttggaaagcgcctcctgcacgatccggaacagatggtcttcaacgccttttgacacacccgtatcgctgatgtcccagtcaatatccagcggctgcttcgctttgaactcttttaacagctcaatcagcccttcttttaagccttttccttctaaagtgacgggccgcaaatgcaatagcagcgctctcatctcgttttgcgcttcccccgccatatgttcaaccatgcgaatccgtttgacgattttgtcatccgcatctttcacctgctctaagacggcggatgtcatcatagaaatggcaaagagctgctggctgacggcatcgtgcagatcgcgcgccagccgctggcgttcttcagtgatgaccgattttttcatttgatcctgccattccgcccgttcgttggagagcttttgcagcgatgtgacctggagctcgacccgcttggccatttcgttgagctggtctgccgccagaccgatttcatcatcgccgagcggcggcacccgataagcaaaattaccgttttcaaatttcaaaaccgcttcaatcagtgtatccattcttgttttaaggcggccgccatatacataaccggaaatcaaccccgccgaaagagacgccaaaagcaggatgaccacaaacggaataccgaaccagccggaagaaaacagcagcatcgggtcaagcccgtaatacagcagcatcagcgtaataaacaccgcgcaaagcagcagactgagtcccgcagtcatccgcatggcgcgccactgaatattggcgagtaattttttcctcataaatacttcacatccacatcgccgatgaataacgaaattgaaattttaatccgccgcggcgagtcgccgtactcagacgatactttatacagattcgggctcatgccgcttttcttagagccgagcaggttcatatcgccgataaaagccgatgaactgacggacacttcgatatccggcgggacgtacacatcgacattgccgatgacaccgctgatggtcatcgtgctttctccttcgggaatcatcgcttttgacaaatcaattttcacatcgccgatgaatccggaaacatttaaatcattcagctcaaacgggtccttcatcatccggagctcgccgataaaaaagctgcggaggtccggctgtctgctttccgtctgggcggaaggctttggctgctcttctttttcaagattgattttcttctctttatgttcatacacgcgctttcctttcaggagcctgtagcccgcgtatatgagaaaggcggcgaaggcatagccgaacaggttaaaggtggcgctgaacaggttcctcaaaaataaaaaagcggcgaagatatacaggacggagccgagccagccgcgggaatatttattaaaaatataacctgtgatcagaaaaaagagcggccaaaacaagaagtcgccgatgccgataatacgcaaaaacatgctgacgcctaataaggcgatgataagtccgagaatctgtttttttgccatcagctgcttgcccctcctttccttgactattgcagtgcaatattgccgctcgtcacttttatatcaatcggcctggcgccgctgcctttcatgccggtaaatgccccgccttccttactcgttttctcaaaggaataagacggccggatccttccgcttgccgtctcggcgttcaccgtaaaacttccgtctttcggcagggtgatcgctgcgctgccgctcgcaagcctgacggatacgggagcatccgccttctcaagcgaggcgtcgacactgccggaagcgacccgcacgtcaagggcgcccgacacatgttgaagcccgacatgtcccgaggataagcggacagcccccgtttttgccgcaaggcctgctgctgtgagattgcccgacagccccttcgcttcaaacacatccgtcttcacgtgcttcagcgacatgttcccgcttacagaacggacgccgaggtgcgcaagagacagccccttgtttccgtcgacggcaatgctgccgcttgatgtatggacggtgatgtcccgatgataatcatacggaatgcggacaatcagcagagggcgctgaaagagattcagaaattggaaccctttctccttcgctttaagattgagggtctttcccctgctttggacaaacattttccccgccggtcccgtcatgtttgccgcgatatcattccgcgcttccgcgatgatttttacatccgtctgttccgatgaaaccgacaggctgttgacggcacgcggcggtatgcttgccgattccgcttctgtttcgtacagcggaaaaaaacgcccggcaaacacttctttcaccaaaaacagacagcagatcagaacggacgccgccatcagtcctttggcaatcttacgcttcattacgttccatcctttttcattcattttattataaaggaaaagccggataattgatacgtgcgtatagggaagagtcgtaaacgcgccgatcttcccttgtgcacattattcatgagccgctttttgacgctctgttttttccagagaaagcgagcgcattttttcaatctcagcttccacctcgtctgaatattgggagcggctgtattctgtattcgcctcagctgaagtgccgtatttgacgcggacttccatttcttcaatgcggctttccattcgaaggaactctctgtaggcgctttcgctgtcaattttgtcgaaagaagcgttcatatgttccttcgcatttgccgcgttcgcgcgggcgatgagcgcctgttttttatcctttacgtcacgaaggcgcgtttctaaagtttccagctgctctttcagctctgccagctgtgttttcgcctgctcatacgctttttcatgttcggccgcttttccctcaaggtatttcatttcagagagggcctttttcgccagctcctcttccccggcgtcaaaagcaagctgagcctggtttttccgttttgccgccgtttcggaggcgtcttcctgttttttcttaaactgatggacgatcgtatgctgtttgacaatcgtttgtttcgccttggcgatgtcactttccatatcacgcacatattgattcagcatgactttcggattttctaatttatcaagcccttcgttaacagatgcgacgaacatatttcttattctttttaagaccattttgtcttcctccttattttttcttcagaaattcttcccattcagagtcaaatccggattgatagcccggtgatgccgcttccggttcatactggcgggaagcggtatctgagccgccctgcttcatcatcttccacccgaaatacaccatggcgccggccagtccgatcgcaacgataaatggaagagaaccgacgagaatcatagccccgatgacgcccgcgatgatacccgataccgcccggccttttgaaaaacgtttgattccccagtaaagcatcaggcctccgatcgccagcgggatgataaatgcgaaatggcctcctccgaaaaagacagaaagtccgaacacaatcagcagaaagccgcctgccgttttgccatttatattcatgcagatcctcctttcgttttccttgtctttactataaacaaatcccgcggccggcaaaacgagtcagagattgattttcatatcagaccggagtcgtataagcccccggaccttcgcataaaaaaacgccgctgcaccggacggcgcagggcgttttacgaaaaatctatattctgatgctcgcttctttttccctgatgagatctgagcgttcggctttggccagcttcgtaaagaacaatattccgagaccggacaggacttcaacgagaccgccggcggcaatgacttttccgggaccgaaggcgttagccgcgtatccgcaaagaaccgcgccgagcggaatggatatgtttgagatcatatggatgacggcatagacttgcggctggtcatcatggtccacagacgtctgaataatcgtatattccggcacattaatcgcgctgacggcagatccgaacgcaaacgcggcgaggaagacgagcggcagaaaagtgttgaggccggtgatgaaaaatgccgctccttctatgattcccgctgacacaaacaggagaccgtatttgttcaccttcaccttagccaaaataaaacccattaaaaaggctccgcccgtgcctgtcgctttcaaaagcgagtagataatcggcggcatgtttaaatcttcggcgacataaacggcagagagcgcctcccacggagcggccgcaaaattcatgaagatacaatagatggcgagcgggtataaaatctggtgttttctgacaagaacgaaaccccgtttgagccttccgaaatacgtcccgcgctgtctgacggcgactgtatcctgtttggcatgctggacttggtatgacataaagagtacgagaaaacctgatagaagatagaatataagagcgataaacaaagaataagcgggactgataaatgttaagaacaccccgctcagcgtaatggcggcaagcctgacgatctggcctgatgactggatgaccgcattcgctttctgcaggctgttttctctgacaatattggggattaatgagatagatgcgggattataagcggctcccgtggctgaatgcacaatcatgagaagcatgacaaaccataaaggagaaaaaccgttaaagtaacagaccggaatgatcaacacgaccgccgcgcgcgtcaggtcggagaaatacatccagaatttcagcgtatgctgcttcataaaaggcccggtaatcggcgccagcatcgcctccggaaggaacgtgaccgcaatgagcagggacgtgccgatcgcgccttccccgtcaaaaatcaaaaaccacagaatggaattaaaggcaaaaccgtcgcctgacaatttaaccagccttgagataaacagaagggtgaaatttttattccagatgctctcgctcttaatatatgtatccatctatcaaatcccccattattttacaatgtttcttataatatctcattttttaatttttcagtcaataatgcataagatacattttcctcctgtcaataaaggttcaattgatggatatctctataaaaaaacagccggcttgctgctgccggctgaacaaaacattattcatcatcacggaataccgcggcgcttctttcatattctatatcctgaacgccctgtcttgcgttaaccgctcttgccgccgcgaaaaaataatcagacaggcggttcaagtaacgcatcaccgtatcgtttatctcttctgttttgccgagtttcacgatgagacgctcagcccgtctcgtgacggtccgcgcgatgtgaagctgagcagctgccttatgcccgcccggaagaataaatttctcaagcgggggcgcttcagccgtgtaacggtctatgcagtcttccaatgcggaaatagatgtctctcttaatgcatagcttctatgttcagtgaccgtcgccaagtcgccgccgcagtcaaacagctcatgctgaatgtttcggagttcggctttcacatcactgcaattctcacaatcatcaagctccgcaagcgccagcccgataaagctgttcagctcatcaatcgtcccgtagctttcaacccgcagactgtctttatccgttctgccgccgatcaggcttgtctgtcctttatcgccggtttttgtatacagcttcatcgttgtattcctccttcttccgccgcttttacacatgccgcggttcctcttctgacggctctttccgcgtgagggacgtccatctcctctcctgtctgcaaggcgcaaatgacaatgtcgccttttgcctgtctgccggaaagagcctgcattctcgcttcagccgctgccgttaacagccgtacaaatccctgttccgataaacgtccgctgatcagcacccaaacggtatgctgcgcagtcacggcaattgtgaccgaatcaaacgtacggcagatcaaaccagcggccgctgagccggaaagccggcggctccacgaaaagcccgggccgtcagatgcggttgacaacattctgaacggccgttctgtatgaagcgttacggtatttccgcttttgtttatcaaagaggcgaacggaacgccggcgggctctctttcctcctgcgcttccggcatgaaagcgatcagcggtttcggcgacgattgctgggcaacagctctgacggtgatgccgtaaatgtcttcaatcgtctcttttttcaaagcctgatccggcgtctgcttcggaaaagcgcgtccgtctttcatcatcaggagctgatcacaatattggcctgcggcgtttaggtcgtgaaaaatactgatgaccgtcaggcctctttctctcgtcagccgcttcaccgtatcaagcaggtctttttgatatttgagatcaagaaaggtcgtcggctcatccagacacagcacctcaggctgctgagccagcgcctgcgccagatagacgcgctgccgctctccgccgctcagattgcggacggattgctgcgcataccggtcaatgcccgtcatttccatcgcttcccggacaatgtcttcgtcatgttgatccacctgtctgaagagtcctttttgatacggatatctgccgaaggacactgtttccttaacggaaaatgtaaaggcttgctccgtatgctgcggcaaaacggccatgattttcgcaagctcccgcggcttgtatccgccgacgggcctgcctgcgacgagcgcctcgccttttgacggagagagcattcccgtcagcaatttcatcagcgttgtttttcccgagccgttcggaccgagtatgccgacaaattcaccttttccggcggtaaagctgacatcttccacaatcatccggcctccgtacccgccggacaggctgctcaccctgatcataagcgtttccctccatgatgctggcgaagcagaatcaaggcaaacacaggcgctcccgccaaagccgtcataatgccgatcggcaattcgacaggctcaatgacggtgcgggaaaacaaatccgccaaaatgagaaaaccggcgcccgtcaatgctgacagcggcagtaaatggcgatgatccgttccccataaaagccgtgtcacgtggggaatgacaaggccgacaaatccgatcgtccccgagacggcaaccgctcctcccgtcagcagagatccggcggcgatcatcagccattttctttttcccgtactgacgcctaacagccttgccttttcttctccataagtcataatgtttaattctctgccattgataagcagaagcgccgtcccggccagaaaaaaaggcagaaacagcgcgacatagccccagcccctcattgacacgcttcctaacagccagcggacaatcgggagcagatcattgcccgttaaagcgatcacaagcgatatgagagccccgagaaaagaattcatgatgatgcctgtcaaaatgagcgtcgaaaccgacatcgacgcatgaacgaggcgactgaaaaacagaaccgccgccatgaccgcaatggctgcggcgatgctgacaaccggtagtgtgaaccggccgatgacgggaatctgaatgccgaaaaacaaggtgataacggctcccgccgaggctcccgaagatatcccgagtgtataagggtcggcgagcggatttttcagaagtccctgaaacgccgctcccgcaatggataacgcggctccgacaagggcagccagaacgactctcggcaggcggatattcatcataatatttacattcatagggtcagccgaggatgtccggccgatcccgatccaaaaaacgtcggataaaggaatatgcagactgccgattgaaatgccgagtgccgtacaaacggctaaaaacagcaggctgaccgtgtaggccagcggccggttactttttaaacgtttcaggataaacgctttctgcaagcttctcgacccctttgacaaggcgcgggcctgagcgtgtgacaaggtcgggatcaacagaatagacattgtggtgtttgaccgcattgacggcaccccagccggcgcgtttttccacttcagcggcctttacgccgtctgtcgtaatgatgacgtccggattcattttgacaatcgcttcatccgtcaattgcacccagccggtctggctgccggcagcatttttcgcgtgtatatctttaagcatttcgttcataaacgtgcctttccccgtcgtgtagccgtcaggagacacttcgacgaatactttcttttcgtctttttcagaaatggccgccgctttcttttctatgccggaaaggtcggatttcatcgatttgatcagcttatccgcctgcttttctttgccggccgcttttccgatcatgctgattgatttgtacacgtcttggaacgattgcgcatcattgaccgttaagacggtgatgcccgcatctttcagctgcttcatcgcatcggcggaagcggacatagaggacgcgtgggcaagcacgagatccggcttcagcgcgatgactttttcagcgttcacattcatatctccgactttcggtttttttaccgcttctttcggatatgtatcatttgtcgtgacgcctgcgaccttatctcccagtccgagcgcgtatgtaatttccgtattgctcggcatgagggaaacgattttttccggtgcctgctttatggttactttttcgttcgcggcatccttaatggttaccgggaatgcttcggttgagacggctttttgtttggccgcgcttccttcttcctgtgcgccggaacagccggcgatcacaaaggcggtgaccaagagcgccgcccagacggcagtgatcttcttcattcttttaactccccctgattatggtaaacgattgtctctttgacattcgtatccttttttcgcagtaattatactataagtctttaaggcttgtatatccggcctttttgcatgaaagcaaattgttcgtacacactaaaattcatcatgtatactgttacacaatggtgtaaaaaggaggattatcatggaattacagcttgaacgaaagctcgtgttgattacaggatcaacctcaggcatcggaaaagccgcggcaaaaagctttttagccgaaggcgccgaggtgattataaacggaagaaaaaaagaaactgtggaacggacggttgaggagctttccgcttacggaacggtccacggcatcgctgcggatttatcgcgtcaggatgaggcggatgacttgataaagcgcgcaggtgtaatcggggaagtcgatattctcgtcaataatctcggtttttttgaagtaaaagacttcgctgaggtatctgatgacgaatggactcgatattttgaagtgaatgttatgagcgccgtgcgcctgtgccggcgttttctgccgcaaatgctcgagagaaacagcggacggattctgaacatctccagtgaagccggtgtcaaaccgcttgcgcaaatgattccgtattcaatgacgaaaacggcgttaatcagcttgtcccggggaatggcggaaatgacgaaaggcacaaatgtcacggtcaactccgtgctgccgggaccgacatggaccgaaggcgtcgcttcttacatggaaggagccgcaaaggctgccggagaagacacagacagcttcgtccgggattattttaaagtgaatgagccgacatctttgattcagcgctatgcaaccccggaagaagtcgccaatacgattgtatttctcgcttcatcagcggcttctgccattaatggcaccgcacagcgggttgaaggcggcatcatccgctccatttaacacaaaaaagcccggcacaatgggaacttccccatatgccagggcttttttttacaccatgcctgcaaacggaaccggctcccagccgcccgtctcaagctctgctgaaaacaggccgcccgcatgcggctgctcaagtctttcggcttccgtcaatttttccgtcgcggtcgtaatgtataacgtgttcaagtctctgcctccgaacgcgcagcaggtgacgtatttcgccggaacttcgatagatgcaatttccttatgcaaaaacgggtcaatccggacggcacggccgcctccgaacagagccacccacagcattccgtcacggtcaatggtcattccgtcgggagatccttgcgactccggaaagcggtagaccgttttcggatctgatacggctccggtttcaggatcatatgaataacagacgatttcctgcgtcggagtatcgatatagtacatcaggtttcggtcccgatcccaatccaaaccgttcgaggtggagacctggtcttttattttggcaaggctgccgtccgtattcagacggtacagcgaagcctcctcttctttgccttccatgctcgtcgttcccgcccataatctgccggacgggtcgcattttgcgtcattgaaacggatatcttcccgcatgtctttcggctgcttcatcttcgtcaatgtgtcttcccgaagattgtacaggtaaaaaccgtctttcatcgtcatcaccagctcttcctttgaatacaaggccagagccgtgacaaatgatttgaatttaacggagcggttgattccgtcagccggagtgaagatatgcagctggctgcccagtatatccacccagtacaggcattgcttatccttgtcccataaagggccttctccgataactgctctcgtatctgctcgtaatgctgcttccatatgtgaacacctcttttgcttgtcagtcttctattgttattcccgacaaagcggcgtccaaacttaatcttttttaaaaagaatcgtaatcaccgttccggcgctgattctgctgttgacatggatggttccgttatgaaggtgtaccagctccttggcaatggcgagtccgagtcccgttccttctgacggtcccttcgtattcgttccccggtaataacggttaaacagctggtgaatcgtttcatcgtccattcctcttccgttatctttcactttcagaatgagctgttcggctgattcctcaagcacgacccgaatggcggtccctttcttattatgcttaaccgcgtttgccagcagattctccagaatacggcggaaccacgcttcatcaatggcgaaaagaatgtcttcctttttggtttcaaaggcgatgtcatagccttccgagaacgtgtttttcgtgaaatcgttcgtgacgtttctgataaacggcacgacgttgatcagccgccgttcgatcgggagggccgcgtttttgaggcggtatgttaagtttaagtcctcaatcagcttcgacatatattctgatttttcccggacgatctgccccatttctttgacttcttccgaggtccagtcgtattgcttcgattcgagcatcatgctgtagccgtaaatcgtgctcagcggggtttttaagtcatggctcagcccggcaatccattcttcccttgtcgcctggattttttctctgtttttcttatcccgcttcagcgtgtcagtcagctgatccatcgattcgaaaatctcggcgaaaaagcggaacggctgttttgttttgccttttttgtttttgctgaccggctgtcctttgcggttcttcggctcttcaagccggccctttgataaattgacaagccatttgatggtatgaaacagcggccagccgaaacggaaagagtaccagatggtcaagatgcagatcataaatactaagattccgatcaagaggaagagggttttcatcacatttctcaaaaatgatttgttaaactcgtgatcggggatgtacacggggttcggcaccgacgcgaccatccatttcgttttatcgagtcttttaaaagaaatttcccgtttgtaattccacggcttggaactgtatttcagcaattcaagctcattgacggtgttccgttcttttttcgtgctgttgatatccccgagcagtctgcctctgtcttcgagaaggtagaccgcccctttttcccgtttaatataatcaaccgtgctttttttatattgagaaagggaagcaagggatggctcctgtgattcgatgtaagtgagaagctgctcactggcggatttccagccgaacagaatcaaataggtctcatcatttatcgtgaccgtccagtaattcagcttgtagttgtcaaaattccggtactggtaaatggataagagatcttttctgctgtaatggctcgggacgtctttcggcactctgtacgcgtagtccgttttttcattgtcattaatgatctgcagccagcccttctgctttcggaccgacatctttaaaaactcatcgacatcccatgtgccgtcttcatttttatcaagccacgcttcaaacgagtccgcggtcgctttggtcagtcccgcattggcttccgcttcgctgaaacgccaatccaaatagaagaaagaagcgacggccaaaacggacatcagcaggatgacaagcagcagctgtccgaaaaagtggagcagaaattttccgcgcattctcatgagcgggttcctttttctccttgatcgggaataaaccgataaccgaggccgcgcaccgttacaatataagacggattgctggggtctttttcaattttttctctgagcttgcggatatgcaccatgacggtgttgttgtcgccgtaagacggatatccccatactttttcatagatctgatcttttgagagcaccacatcagggtgttcacagaaatattgaagcaattgcagaagctgtgcggagcagctgacgggctctcccccgacgatcagctcggcgttttgcggtgaataggaaaaatgactgtatgaatacgtctttaccgccgttttctcttcgcgcttataggttctctttaacgtcgctctgatccgcgccgccaattcgagcggattaaacggctttgttatataatcgtcagctcccaatgcaaatcctgacagcttatccgcatcagaagaacgggcggtcagaaaaaagatcggagcgtcggtatagttccggatttcggtgcatgcttcaaaaccggacatgccttccatcatcacatccagcacgagcagatccgcggtttcatgtttaacaaactcgatcgcttcctcagcgcttccggctgtcttaatgttgtgatagccttctttgacgagaacgcgtttgaccatatcaacgatcgccttctcatcgtctacaattaaaattgacgcattttccaccttggacgttcctttctctttgtttttttcatcatatcattatatggataagatttggtacctttttagtgcggaggtcttgcggggaaacagaaaagaaaaacgagaccggacatctcttctcgtttttctcacgttgtcagagcggaatatccatcattccgccgcttttgtcaggagctttcatttataagatgaagtataaattcccaaaaacccggcacttcctggcataacagcatgtccgctttttcaacgatcttaatcttcaattcttgttcaagatcttctctttcctggtatgatgtattgctcagttttttttttatcattggcgaaaaacgcgaaatcaaaagctccatttcgtcggtatctgtgttctctttgttgaagtcaaatggcccgttcactgcttattttccccctttttttgcttgtccagctgctttctgagattgtcgagcccttttttatgaatattggaaatgttctgccgtgattcacccagcgactcggcaatctccttcatcgtcgctccgtgaagataaatattcgtcagcacgcttttttgtttatcggttaacgtctgaagcgcttcgtataaatcacggttttggacatgctggctcaaatccccctgcttccgcagaaactcttcatacgcatcttttcccatttcatagggaagcgcttcacctccctccggctgatccaccgtcagcggatagcgcttctgatttttacggatgcgcttgtcaaaatcgatggagaaaatccggatcatagagttcatatatttgatgatccggatttccttataaaactgtttaaaatggtcgtccagtgattttgcatccttctcgtctgaatgttccagcacatttttaaatttctcgtaatgctttgggtcacttaaaaaatgtttaacgatcggatgtttcataatttccttgcattttgaccgtaaaagaacttgatagtccataaaaccgccccctatttaaattaaatgaaagaaagcaaaaaaaagtaaactactcctttccgactaagattccgcactccttatgtcccggatttgccggaacaaaaaaaagaccctcaaccgggatatcaggtttacaggagccgctctttctttcacttatatacatgactgcaggtcaagtcaggaggtggctgataatggatcaggtttttatagaagaagcggtcagacagctcggcaatctcggctttccggctctgattgccatgtatcttctcacacggtttgagaagaagtttgacgccctgatcgaactgatgacggaactgaaagatcagaaaatgaaaaattaattttcacacgaagttgacttttcatcggaacgcatcacttaacaaagcagaagggaaaacgaaaggcctttcacattctctttctgaaaaaacaaagcttgagaggagacgatttacatgtcaaaagaaaacaactgcaatatcccacagccgatcagaggagacaaaggggcgaccgtcacgattccgcgcaaccttgaaagagaccgccaaaatccggatatgctgacgccgccggaaacggatcacggtacagtggataatatgaaattctctttctcagatgtgcacaaccggctggaaaagggcggatacgcgcgtgaggtgaccgttcgcgagctgccgatttctgagaatctggcatctgtcaacatgcgtttaaaaccgggcgccatccgtgagctgcactggcataaagaagcggaatgggcatatatgctgacaggcaaagcgcgggtcacgattgttgatgaacagggacgcagttttatcgatgacgtgaaggaaggagatctgtggtacttcccgtcaggcctgccgcactccattcaggcgctgaaagaaggctgtgaattcctcttggtttttgatgacggttctttctcagaaaacagcacattccaagtgactgactggctcgcccacacaccgcttgatgtcatcgccaacaacttcggggtttcagaaaaagacctcgccggcctgcccgggaaagaaaaatatatctttgaggagccggttcccgggaagctgaaagatgacattgtggaaggcccgaacggtgaagtgccttatccgttcacttaccgcctgctggatgaaggtccgactgctgagacggatggcggcaaagtatatatcgcggattccacaaacttcaaagtgtccaaaacgatcgcttcagcgcttgtcgtggtcgaaccgggcgcaatgagagagctgcactggcatccgaacacgcatgaatggcagtattatatttccggtaaagggcggatgacggtttttgcatcggacggccatgcaagaacatttaactatcaggccggggatgtcggttacgttccgttcgcaatgggccactatgtggagaatttgggagatgagccgctcgtcttcctggaaatcttcaaggatgaccactatgccgatgtgtccctgaaccaatggcttgccatgcttcctgagaaattcgtccagcagcatctggatctgggcaaagactttacggatattctttcgaaagagaaacaccctgtcgtcaaaaagaaatgctgaagatacacaccggcttgcagagttccgtctctgcaagtctcctctgtgtgaaaaggagctgaacagatgatcaatcaaaacgggacgaaaatgttttttcttcatgtgcttcggtatgccctggcagccgctgccgtattattcgggtatttcatcgtgatgatggccgtattttcattagccgggacgagctacggatcgatggcgtacgtcctgcttttttccgtgctttttatttttctcggtttatgttttgaaccgcttgagcggctgatgatacatagctttaccttttttgggacgggcaggctgccttttctccttttagccagcaccgttcagctgctgttcctctggatgaccgcgtatacgacggataaactgattgaaaagatttggctgtcaacgacggaggagctgattgtggcgggggtttttttcgttttggataaatgcgtctccggagaaaagcagacccgggcgcaataaaaaaacgcaggccggaatggctctgcgttttttttcatcataccgttgcgctttcatgccggattaaatcgtaggttaagcagaccggtttgttcgtgcgcggatcttttacaatctgtgcgtcaatttgaaaaacgtctttcaatatgccgggagtcatgacttcctccgccgttccttccttgatgacgcgcccttttttcagggcgatcatgtaatgggaaaaacgggcggcatggttcagatcatgaatgaccattaaaatggtgcggccctgctccttgtttaatttgtccagcagctgcaaaatttcaagctgatgggcgagatctaaataagtggtcggttcatcaagaagcagcagctccgtttcttgagcgagcgccatggcgatccacacacgctgccgctgccccccggaaagcgcttcgatcggccggtcgtaaaattcggccatccccgtctcttccagcgcccatttgatcatgtcacggtctttatcactcaaacggcccattccggactgatgcggaaacctgccgtaagaaacaagttcgtacaccgtcagcccgctcggcgcttcaggcgtctgcggaagaattgccatttccttggcgatgtctttcgtggatttttgcatgatcgcctgtccgtttaaatagacggcgccggatttcggtttcatgattcttgacatcgttttgagaaccgtcgattttccgcagccgttcggaccgatcagtgttgtaatttttcctttcgggatggcgatatccaattctttcgctatcaaacggtcgccataaccgacagtaagctgttccgccgataatgagttcatcgcggcagtctccttcctctatttcgttttcatcagcaaatatacaaaatacggcgctccgagcacggaaatcaccaggccgacgggaacttcggacggtgcaagcacatttctcgccagcgtatcggcaagcagaaataaaaatgctccgattaaagccgaaaccgggataagcgtctggtggcgcggtccggtaagccttctggccaaatgcggcgcaatgagtccgagaaaagcgattccgccggctgccgcaacacatgacgcggtcagggcaacggcgcacatcagcagaacgcgccgctccttttcaacccgggtgccaagccccgccgccagctgatcaccgagctggagcacatttaaatacctggctttatagaggctgaacggtaaaagaaccagcagccacggcaaaatggacagcaccattttccaattggcgttccaaatcgaaccggaaatccatacaagcgcctgcatgaaatcccgcgggtccattttcagctgaaaaatcaagagcagcgcattaaaccccgcattgacgccgatcccgaccaaaacgagccggacaggtgaaacgccttttttccaagccagaacatagatgagcagcgcagccagaaaagcccccgctaaagcgctcaccggaagcagccatgtaccggccatgcttaaatcagcagctgatccttggaaaaagaagataaacaaaacgaccgccaaagacgccccggcgttaatcccgagaatgcccggctccgccaagtcattttgagacacgctttgaaaaatcgcgcctgaaactgcgattccggcgccgaccagcaatgacagcaccatgcgcggcagtctgaattcaaataaaacgagctgatcccgggcatccccctgtccgaaaaagacacgtagcgtatcaagaggcgcaatccggatcacgcccatgtttaagctgataaaaaagacgatgcatatgagcaaaaacgtaacggccatgaccgccagcggttttttcgattttacattcattacagccctctcctttccctgcgcgccaaataaaagaaaaagggaacgccgataagggcggttaaagcgccgaccggtgtttcaaacggcgcattgacgagtcttgcggcaatatcactgaagactaacagaacggcgccgaataccgccgaacagggaatgatccacctgtaatctaccccgactaaaaatcgggtgatatgcggaatcaccaagccgataaaagaaatggctccggcgactgagactgaagcccccgtcaagaggacaacgacaaacattccgattactttcacaagcgatgtgtactgcccgagccctttggccagctcctcacccaagctcagcaccgtcactgagcgcgcaatcagaaatgccagcaaaagtccgataaccccgaccgccaacagcagctgcacgccttcccatttcacggaagcgactcctccggcgtaccagaacttcacatcctgggcgacatcaaaacggatcgcaatcgcgcttgaaagccccgttaagaaatagccgactgccgtaccggccagcgcgagcttcaccggtgtcagaccgccttttgaaaacaggccgatgccaaacacaataagcgctccgattcccgctcccgcgaaggaccacaaaacaagtcccgccgcagacaggcccggaaaaaaagcaaacgccaatgcgatcgcaaatcctgaccccgacgtcacgcccataatcgaaggctcagcaagcgggttccgcgtcagcccctgcataatcgccccggacacagctaaaaaagccccgacgagcgcggcggcggcggttctcggcagcctcagatcgcgtatgatttgatgagatgtattttgcggctgaaagtgaaagagagcatcccacaccgtccgcagatgaatatcggcagctccgatggaaacagacagggccgcgccgatcaataaaaccgcaatcccggcacacagcagcacagccgctctgaatgaacgcgccgtccactggatttcactccctgatgcccctagagccgtcattgtctgtttctttttcaatagacccaacactcgttcttcctttctcaaaacaagaatggtaatgataatgattatcaatgacttgtttcagtatagcacttttatcttctcttttaatagacctaatttcatataaaaaaagaaagtttttcttaaaaaagagcgtgcttctctatgaaagcagtgatataatcacactgataatgattctctttatcactaattttcatgaaagaaggaatgtcagatgttccatacatacaagaaaatcggcgcagcgctgattgccatgctgctcatcgccgctttggccgcatgcggcaattcttcagacacgaaaggttcttctgaaaaagaagaaaccatcacgtataaagccgaaaacggcaatattaaaattccgaagcacccgaaacgggtcgtcgtcatggctgacggctactacggcgactttaaacagctcggcatcaatgttgtcggcgcgccgcaaaacgtatttaaaaacccttattacaaagggaaaacaaaaggtgtgacaaacatcggcgacggcacgtccgttgaaaaaatcattgacttaaagccggatttaatcgtggtctggacgacacaaggcgccgatattgaaaaactggaaaaaatcgcgccgaccatcgccattaaatatgacaagctcagcaacattgatcaattcaaagagtttgcgaaaatgacaggcactgaagataaagcaaacaaatggctggctgaatgggacaagaaaaccgctgccgctaaaacaaaggttcaaaaagcggtcgggtcaaaaaccatctccatcatgcagacaaacggaaaagacatctatgtattcggtaaagacttcggccgcggcggaagcatcatttatgacaaactcgggctgaaggccacaaaactgacgcaggaaaaagccattaatcaagggccgggctacgccagcatttcactcgagaaactgcctgacttcgcgggagactacatctttatggggccatggcaggccggcggtgacgacaaaggcgtgcttgacagctcaatctggaagaacctcgatgccgtcaaacaaaaccatgtctaccgcattgatccgatcggcttctatttctcagacccgatctcacttgaaggccagctcgactacatcacaaaaagcttaacaaagtaaccccgaagccgctgtcacagcggctttttattacgcttaaaacttgacaaaaaaatttatttatgctataatttacatttttggattaacatgtataataagattctcccggccggagattgatgtaaataacggaggatctttatatgaaagaaaacaaggcgagtatgacttccctgctgtccgctttcggaagggcgtaccacagtaaatacgacaccccggtgatatttgatgattttatggcacaagatctgatttccgaaaaagagcattcggacatccgcgatcatctgattcaaggtatatcatttttcagtaaagacatggcacagaggcttcaaggccaaccgaatgacatcttaaaatgggtgactcaagtacagctgtctcctacaccgttagcccgtgccgcatattgtgaagaagtgcttttgaatgaagtgaagctcggggccaaacagtatgttatccttggcgcggggctggatactttctgtttcaggcatcctgagatgacaaacgccttagacatatttgaaatcgatcatcccgcttcacaggaagacaaaataaacagattgaaacatctgaatctcgacatttcccatcatcttcattttgtaccgatggacttcgccgcttcgctttctttcagccgtctgtatcaggaaggtttttcacgccaaaaaacctttttcagcctgctcggtgtgtcatactatcttacgaaagagcatctcgcccgcctgctcacacaattatttgccgaagtcccgccaggaagctctatcgtgtttgattatgcagatgagtcgctctttgaagaaagaggactgtcaaacagagtggaaaacatggtgaaaatggctgcagcaagcggagaaccgatgttatcgtgtttcagttataaagaaatcgaaaaaatattagaatcatcaggtctgcttatttatgaacatttatctccggcggacgtcaatgaccgttttttcagcggacgcactgaccatttaaccgcattcgagaccattcattatatacatgccgtcaaaaagtaatcagctgccgcaaacaaaaaaagacatctcacagacgtgagatgtctttttgtcataccgattgtctgttatttgcaaatttctttgagacgaaaggatataacagcaaaccgacgaaaaacagcccgataccgagaataaaggtcgttaaatcggccgttccggtaataatgacataaaaagaataaatgcaggcaaggatggcgatgataccgtctcttactcttgaaccctttatctcgtcatacgtttcacccgtaaaaatgagcttcaggctgtaaaacgctgacacgagatacggaatcagataagcgagcgtcgccgccgtcgttaaaaacgtaaacgcgtcactgatcgtccgggaaataactgaaaagataaagatctgtgacatcacgttcgttacgattaacgacacaaccgggctgccctgtttattcgtttttgcaaaagcagcgggaaagtctcctgatttcgccgcttgatacggaacttcagagccgagaagaatccagccgagcatcgttccgaacagacacaaaatcgccagaatcgccatgatgacgcttcccgcattgccgacgatcgcgtacaatacgtcaacaaacggtttttccgagccgacaagcttaccatgcggaagcacgcccatcgtaatcaatgtcacgatgatatagatgccaagcgcgatcaataatccggtaatggtggcgcgtttcacgtcacgctgcgaacgggcgcgcccggataaaatgactgccgattcaattccgacgaacgcccataatgttgaaatcgccgcattgtggatctgtccgccgattccctcaactgtgtgaggacctgtttgaaccggaaaataaaaatgatcgaaaaacgacgtttgaaacacaaataaacctgcaatgataaagaagataaatcctaatacttttgaaaacgtcgtgacgaaatttaatttactcgcaccgttaatgctggtgacgagaatcgtgtgagtgccccataataaaaccgtacatacggcaaacgtcagcagctggccgagcgtaaccgcctgaccgccgatcgaaaacatttcacgcttatccgttaaaatcgggaaaaatgatgttaaatatccggcaaggctcgtgatgatcgccacgttgctgatccagctcgccacccagtagccccagaccatcgtgaagcccgctgcattcccttttttccgatcgctgaacagcgcacgcgcatagctttgcggccccgccgtcagctcaggcttgcggatggataagtggccgaagaccagcgcgatcattaacacaccggctcccgttaaaagccatgccgatgtagcgccgaacgggctcgcgatttttgcgagcgtactcggaagcgaaaagatgcccgagcctaccatatttcctacgacaaacgccgttaataaccaaaaaccccattttttcgtctgttccattcctgtacctcctggttgttcattcgtacggaccagaccccgagatcatatttacacgcaaaaaaagcctgaacaaaagtccatgcttaaagaaacacacacacccttgatctccggatagccctccgcgaaaaagcacgcggcagtcctgcacttattcagatacagtcccagcataaagaaggatcggctttctttacacttcggcgctgatgcctttaacacatgttttgcggcccctatcagcctggcatgtgcgactcatcatcaagcgcaacctctacctcaccgagaaagagtgaggatttttatcattcaattctactcagaggttatcagagataaaaagatctgtcaaagggaaaaattagatggaaaacggatagagcgttcgccctacccgtcttatatggtcagcggttgttttttttcttttgaacagcttcttgaagcggatcgtctttcagagctgcaccggcgtcttcaagcgcgccttgaatgacgtttttgtttttatcgctgttttttcctttttctttgttaaagaaagccatctgtatcacctctttatcaaatataggtacacctataatgtgtctttttccgcggcagaatatgcggaatccccgtctccttccttttggcggaacaggtaaagtttgttgatcaaacatgcattctcttgatatatttgtaattcaggggattttggcaaaaataaaaaggagaagcgaaaaatgacaggaaaaacacacatcatgggaggcatcgcttcttgttccgcaattgcgtattattacgggtatgatccggtccttatgacctcagcgggtgccctcggggcgctgattcccgacatatgccatacgaaaagcaaaatcggcagaacgctgcccgttctgtccaaaatcgtaagcacggtgttcggccacagaacgtttacacacagcctgctgtttatgcttattatgtttttcattacggcaacttatattccgaatccgagcatttccgcaggactgatgatcggaatggcgagtcatcttgtgcttgacgcatggaccgtcaacggcattaaactgctgtttccgtccgccatccgcttccgtcttcccctttatatgagaacggggagtttttcggagcagcttgtgctggccggcttaacgattgtatcctgctattatttatacgaactggttcacggccgcatctcttaaacaaaaagcatctttcgcttttagggtgaggagtcatacatatgaagaaaacctttttcagcaatcatcggtttttatgcctgtccatcctgttcatgtggatgaaaacctatgccgtttataagctcggttttgatctgcagaacaattcggttcttgaggaatgtctgcttctcattaatccgctgagcttcattgtgccgctgttcggcatcgccctcttgctgacagaaaaaaaacagcggatctttctgctttcggcaaatgtgatgctgacgggaattttaatcgcgaatacggtgttttacgggttttatattgattttatcaccataccggttttgtttcaggcgagcaatatgggtgatatgggaagcagcgtccaagagctgtttcacccgctttatatcgctttatttttggatattgcggttttgttttaccttggtaaaaggcataaagccgataaagggaaagccagcacccgtaccgttaaagcgtatgcgtgggcatcagccggcctcatgctgtgcaaccttgcactgtctgaggccgagcagccgaagctgttcaagcacccttttgatcgtgaagcgctcgtaaaaggaatcggcctgttccactttcatttgtatgacaccatttcgcagacgctgaatgcaggggcaaaagcgtttgccgatgaagacagccttgcggcggtcgcgaattacactcaagccgactacagcaggccgtccgaatcaaagttcgggctcgcaaaggggcgcaatgtgatttttgttacgctcgaatcaacacagcgttttgtaatggatgagcgggtcaacgggcgggagattaccccgtttttaaataaactgcggaaaaaaagttatgacttcactcatttttatcagcagactgaacagggaaaaacctcagattcagaattcattactgcgaattcgctgtatccgtcttcaagcggcgccgtttttttcacaaaaagcggccaccggttcaatacgatgtaccatatgttaaaagatcatcaatactattcagccgttctgcatgccaatcataaggccttttggaaccgggatgagatgtacggggcattcggaatcgaccgttttttcgacgcggatgaatttaaggtgacacaggaaaattcaacaggctggggcctgaaggataaggaatttctcgaacagtcagcggaaaaattaaagaagcttccgcagccgttttacgcgagcctgctgactttgaccaaccattttccttttgaaattgataaacaggatcagctcattgaggaaccggacacaagcagcgagttattaaaccgctatgtgacgacggtccgctatgaagatgaggccctgaaacactttttcaagaagctgaaaaaagaaggactgtatgacaacgcgatgatcgtcctgatgggagatcattacggtatatccgaagcccataatcaaggacttgccgaattcttagggaaagaggaaatcactccgtttgatacggttcagcttcagcgcgtgccgtttatcattcatattcccggggtgaccgaccgtgcgccggaaacgattgcttcggccgcgggacaggttgatgtaagaccgacgctgcttcacctgctcggcattgaaacgaaaggcagcattcagttcggcaatgatctgttttccggagagcggaccccttttgcggtgctgagaaacggcagctttatcacggatgatcatatttatacgaaaaatacgtgttacagccgtaaaacgggtgaaccgctttctgacatgagcgcgtgcagcgatgagaaagaaaaagcggaacaagagctgatgctttccgataaaatattaaacggcgacctgctgcggttttataagcaataaaaaaatccctccgttatatggagggatttttcatgtttcatatataagccgtccggtcattttcgtatcatatccggataattgagaaagctgagacttgaattcctcagaattaagaatgtcctgcacgctttgaacaagctcccggttttgttttaagacgaccacatcgtactgctcactgatcaccgggataaagtccgtgcccgccatatgcgccgcatgctgcgacccgactccgatatccgcctttccgcttgatacttgtgaagccgctgacagatgatccgtgacaatgtcatgatagccggcgacatcagacggcgtaatgctgaaagatctgagctgttcatccagcagcaccctcgcgcctgatcctttttcgcgattgacgatgcggacatcttttcggctcatgtcctgaaaaccctgaatgttcagcggattaccttttttcacatataatccggcctgccgcagcacgacatgaaaaagcgcaaacggctcccctgaaagaatgcgcttcacgtacgggatgttatactgccccgtctccccatcgtataaatgcagactgacgatgtcacaggccccgcggtacatctcgatcaggctgttcaaactgccgctgtacttgcggagcggagccgcctgtattgtttgttccagctgtttgctgaggaggtccatcgacacatcctgcccgctgatgataacggactgccttttttccggctcccgcccgcgggacgggtcaggcgcttctgctgcggatggcttttttgacattctcatgtttgctttatattgttttaagtcctcttcatcgaccctcatctgtcttccgaccctgtacgccggaatgagtcctttttttatcaaatcatatactgtcagtttggagaccttcaaaaggcccgcaacttcttctattgtataggaagtggcttccgtcatattatcacgctccgtttttattataactgttcagatattgaaaaaaaaccgcaccatcacgtacaattgcgttataattagtttgatctaatgatatttagctataaggggtgcacaatgttgaaaaagaaagcgacactactcacaactgcggctatggccgttttccttgcaactgcgggctgctcatccggacaatcgtccaaaggcggacaaaacgaaaaagtcacgctgaccgtctctgcggcagccagcgctcaggatgcacttgaagaaatccagaccaactacgaaaaatctcattcaaacgtaaccattcaagacaacttcggatcatcaggcacattgcaaaaacaaatttcacaaggcgcgggagctgatttattcttctcggcagccgaagataaattcgaaaagctcgttcatgacggagatatcgataaaaaggacagcacggatcttttgaaaaatgatctcgtcatgatcgtgcctgagaaaaacagcgcacacctgacacatctgaatgacctgaaaaaagacagcacggaaaaaattgcgctcggcacgcctgaatccgttccggccggacaatacgccaaacagtcattgacggcattatccctgtgggacaaggtaaaagataaagtcgtctatgcaaaagacgttcgccaggtgctttcttatgttgaaaccggaaatgtcgatgccgggcttgtctataaaacagacgcgctgatttcgaaaaaggtgaaaatcaccgatgaagcgccggcgaaaacgcacgatccgatcgtttatccgctcggcatcgtcaaggatacaaagcaccgtaaagaagcagaagcgttttatcagtatctgcagtcagatgaagcaatgaaagtgtttaagaaatatggatttactgccaagtaacattacggcttcggaatttttcaccccagtcgtattgtcttttgaggtcgctttggcatcaggcatcgccgtcatcattctcgggacgcttgccggcgcctggatggcgaaagcgcgatttcccggaaaaacggctgtggagaccctgtttatgctcccgctcgttcttccgcctaccgttgtcggcttcattctcattattattttcgggaaacacagctttatcggccgggcgattgagcggatttttcaccagcccgtcattttaacgtggtcggccgcggtgatcgcttcggccattgtcgccttcccgcttatgtatcagtccgctaaaacgggcttcgccgcggttgatgccgacatcgagggagcggcgaaagtagacggagccggcaggtggcaggtgttcacccgtatttccgtcccgcttgcctttccctccctcttgaccggaagcattctcagtattgcaagggcgctaggtgaattcggggcgactttaatgtttgcgggaaatattcccggcgtcacccaaacgctgccgacagcgatttacgtcgcgatggactccggcaatgaaacactcgcctgggtgtgggtgatctgtattgtgatcatttctttcctgatgctgtttttcatccaattgaaaaaacccgcttgaccgatccgccttccgcgcacctttcgccgggaggctttttgatttaaaatcggatggtatataatgaaacaaaaaacacacaaagggtgcggccatgaagattaatgtcattatcgcggatgataattctttcatcagagaaggaatgaaaatcattttgcatacatatgaggaatttactgtatcggcaacgttggaaaacggcctggaggcggccgagtattgtaaacacaatcccgtcgatatcgccttgctggacgtccgcatgccggtgatgaacggcgtcgaagccgcaaaacggatcgcggaggaaacggatacgaagccgatgatcctgacgacatttgacgacgatgagtatattttagaagcgattaaaaacggcgcgaaaggatatttattaaaaaacaccgaaccggaacggatacgcgatgcgatcaaaagcgttttcaacggacacagcattcttcaggacaccgtgctggataaaataaaagacagccttttccggccggcggaagccgcgcatcagattgatgaaagccagtttactgaaagagagctcagcatcatgtcgcttattgcgaaaggactgtcgaacagggaaatttcaaaacagcttttcatttctgaagggacgacggccaattatatttcatctattttaggaaaaacggggcttgagcacagaacgcagatcgcgatttattatatcaccgggaaggtggataacgggcgttgaacggtatggatttttggatgctgatgagcagactgattgccattttttatacggcttttttgttcgtatcggcagaccgcccttacacgccgtatgccgtcttgtttctgctgctttatctgtctttgggcattgcggtctgcatgatcaggccgcccgcttggaggcgcgggatcaccctcatgacgctggcattgactgcttggctttccgccttaggccatccggcgtttctgtttcttttaccgcccgccatttttgcggttcttgccgaatatccggttcaccgctatgtgttctgcctgctcgtatttttgccgtttttatttatcccgtacggcgaccttccgacttatatcgtcatgaccttgttctgcttggcgatattcgttttggccgcccggtccagcgaccggctgaaaaaatatgaagagcagtcagacaacatgcgctcaagcattgaaaaactgacgaaacagctgcacagcagcacggaatatatcaaacaatcggagtataccggcaaactcgaagaaagaaacagattgtcccaagccatccatgacaaaatcggccattccatgacaggcgcgctcattcagatggaagcggcgaagcggatgctcggctcccatccggacaaagcggctgaactgctccaaaacgccattaccatttccaaagagggcattgaggatatccgcataacgctgaaaaatatgaaaccgcccgctgaacaaatgggcattcacagattaagaacgtttattgatgaattttcggccaaaaacgggatgccggttccgtttacgcatcaaggcgatttggacaggctgacgcaaatgcattggagagtcattcaggaaaacgtaaccgaagccttgaccaatgcaatgaaatacgccgatgccacgcagattttcattgatatccatgtgctgaataaagccgtgaaagcggaagtgaaagataacggaaacggcgccgtccgctttaaaaaaggcctcggcatgctcggtatggaagaacgggcggccgtcctgcacggaaccgttatttttgacggcacggccggtttttccgtcacgacattgcttccggttgaataagtgaatgttttcatgtgaaaaatatgaagattctcatgtcaaaggaatgaacagctgcactaacggccgttcattcttttttttataataagagcatcataagacatagaggtggaaacatgaacattttggagctcaaacagctgagtaagaaattcggtgattatgccgccgttgaccagatgtcgcttgccgtaaaagaaggtgagattttcgggtttctcggcgcaaacggagccggaaaaagcacgacgatcaatatgatctcaggccttttaaaaccttcaggcggagacattctgtttctcggaaaagatattttcaaatatagcaaagcaacgaaaatgaatatcggcatcgtccctcaggacctcgcgatttacgaagaattaaacgcctatgaaaatgtgaagttcttcgccgggctgtacggcctgagaggggcggctctgaaagaacgggtcgaggaggccctgacattcgtcggcttgagcgataaacacaaatatttgccgaagcatttttccggcggaatgaagcgcaggctcaatatcgcctgcgcccttgcccaccggccgaaactgatcatcatggatgaaccgacggtcggcattgacccgcaatcaagaaattatattctgcaatcagtgaaaaagctgaatgaaatgggctgcacgatcatctacacgagccactacatggaggaagtggaagaaatatgcacgcgcatcgccattatcgaccatggaaaagtcatcgcagaaggcacaaaagaacagctgacctccatcattaccgacacgaaggacgtcgtgattgagctgtcatccggaaacggcatcagcctcggcgatattcaggagctgcccggcgtcagagccgccacactggaagaaaacagcgtgaaaatcagctctgacacaggggtcaacaatttaaaccgcctgatccggtacttcatggacaaaggaattgaaatccgctccttgcaggaacaggcccctgacttagaaacggtatttctcacgctgacaggcagaagcctgcgcgactgaccccgctgaaaggaggattgcaaatgaatattctgcacatcgccgggaaagaaatcaaaatcagtttccgcgacagacggacttttattttcatgcttgcttttccgatcgtcttcatgctgattttcactgcggcattatcaaacgcctttgattcagaggtgacggtcggaaacatcaaggtggtatatacggaccagtcaaacggccctctttctcatgattttactgagtttatgaaagccgccaaaaaagagcatgtctattttcaaaaagcggacacggaggcaaaaggcaaaaacgaggttcgagaaaatcaggcggatgctttcgtcactgtaaaaaacaccggttttcaagtctttacaaatgaccggagcggcataaacggcacgatcgtccaaggcatgctgaccgcttttaccaatcaatacaaagcaggcgccgccgcttacaaggcgcataaggcgccttccgccggacaaatcaaaagcgattatatgaagcagacgtctttacacaaagcgaaagaaccgaaagcgaaagatttttacgcgatatccatgacgacgatgatcgggctgtacgcctcgatttttgcaagcaccttattccgcggggaaagaatacggcacaccgcagatcgcctgatcgccgccccgctccggaaaagcgatatctttctcggaaagatgctcggcattttggctgtgaatgttctgacgattcttgccgttgtcgccttcagcaaatttatcttaaaagcgaattggggcagccacatgggacttgtgcttttgattctcgtttctgaaattcttttggccgtcagcttcggactcagcctgagctatttgaccagaaaacccgaaagcgccagattaatcaccgtcatcatcgttcaggtgatgtccattatcggcggcgcctattacaaatatgaaggcggaggaatttccgccctgtcgcccttatcctggatcaataaggcgattaacaacatcatttacgcaaatgatgtatcagcggcatggcctgcactcggtttaaatacagcattggcggcactctttttgctgatcgccgcatttacgtttcaaagacgggagggactgtaatatgaaaaacttctggtggctgtttgcgcacactctcaaagggattacaaaaagcaaaaaacagctcattctttatatcggggctccgctgatcggcgtcttcctctccttcatgaccaatgccaacggcggagccgaaacgctcaatatcggcattctcaatcaagacggcggagaagtggcacaggatacggccgcgtttttaaaaggactggatcatgtgaagatttcggaggaaacagctgcgtccgcctcatcaaaaatcgcttcaggaaaaatggaggcgctcattacgtttgaaaaaggcttctcccaaagcgtaaaagacgggaaaccgtctcacatcggcatgacctcgctgaaaggcgcccaggtcaccggatatgtcagctcttatttgtacaattatatgaacagcatcgcctcaatcggcaaatcctccggcggagacgcaaaggcctttcaggcgatgtacgccgatttcaagcattctcccattcaaacggagtccgctgttttacaagatacatcgaaccataaagaaatgacttactcagtcatcgggtatctcattatcattatgctctattccgccggcaacctgacggaactgatgattaaagagagagaaaacaggacatactacaggcttctgtcaacgccgatcacatcaaagcagtatgtattggcgaacgcggcggtgaatatcattatcatggccgtccaaattctattcgccgttctctttatgggcgccgcttttcatattcatccgtcattcccgctgtggcagctgttcgtcctgatgatgctgtttgcattaagcgcgattggggtcgcctttattgccgtcggtttttccaacagcagcgcttcggcatcggcgcttttgaatttgatcgtcgtgccgacatgcttgctggccggctgcttctttccgggcaatattatgccgaaaacggtgcagacaatcgccgaatttctgcctcagcgctgggtgctcgatacggtggatcaattgcagcaaggccgcacgttccaaagcctgatgctgaacatcatcattttgggagccttcgccgccgccctgttattaatagccgcatacaggttcagcgtaaaacgtcagacacagacatttatgtaaagaaaaacagccccgtaaagggctgttttttcttagaacagaagctcgtccggattcgggccgacacgctcgtctttgttcaatgcgctgatcttttccatttcttcctgtgacagttcgaaatcaaaaatatcggcattttctatgatgcggtgctctttaatcgatttcggaatggtaacgacttcgttttgaagatcccagcgcaaaatcacttgagcaaccgatttgttatgtttttccgcaatttgtgacagcacttcgttatcgaggagctgtccctgcatcaatggagaccatgcttccacttgaatgccctgcgctttgcagaaatctcttacttctttttgagtcaggcgcgggtggaattcaatctgattgaccatcggcttgatttcagcatctttcagcagctcttctaaatgatgcacttggaagttgctgacgccgattgcgcggattttgccgtctttgtacagcttttcaagagcgcgccatgtgtctttatatttatccttgcccggccagtgaatcaggtaaaggtcgaggtaatcgaggccgaggcgctcaaggcttttctcaaacgcgtcaagtgtcgtttcgtatccttgatcttcattccacacttttgacgtgatgaacagctcttctctggcaacgcccgcagctctgatgccttcgccgacaccctcttcatttttgtaaatagccgccgtatcaatgctgcggtagccgtttctgattgccgcttcgacggagtccgccgctacgcttccgttttccaccttgaagacgccaaggccgaaccacggcatttcaacgccattatgaagctttacagtatcttttaagctttttgccacgttgaaccatcctttctagtcattatgtaaacggttattattatctcacatttccgccgtaagaaaccaattattcgctcatcgttatcacaaaaaccatctttagtgcccaagcaccactaccgttattattttcctatttttcaaaaatcctggttaaccgggtaactgtccgggtaaatcgctactgtagccaccacacaattgaaggaggaaatcatatgaaacgtatgcgtatcccgatgtccgttgcccttggcgccgctttgtctctgactcctctgtcctttgtatccgcaaaagaaaccccggtccctcaaaacatggcacagcaatcatcagatgtctcagcaaaagatgtcggattaaacattgacgttgacctgctcggcatcggcaattcgattgctgacgcgattaagtcggcgcaaaaccgtgacggcttcgtcaaaaacttaatggaatcttcattctacgcttccggacaaaaatataacgtcatggtgtttaatttaagccaggaatatgaagatcattttaacggtgttcagttctacggttccgccgtttatgacggcatcacgtacggcatttgggtgtttgaagacggaagcttcaccaataaaggtgatggcggctggatcaactgggccttcagaggctggtttgaccgcgacggcgatcacgtcgaattccatcgtccgtaatcaaaaaaagtccggcgacagatgccggacttttttgatttattcatctccgtcaagcatggccgcttccacatcattgatgtattggcgaagctcatgtgacatatcgcgggaaatttcccgctcttcgaacaatgtttggatttcgttgcggatggcctgcacggcccgcagtttgatttcgagtttttgattttcaaaacggcggctcggactctgttcgtgatacgtgtgccccagcctgaaaatcaagtgattgtaaaaggaaatgacggcaagcgtcacatctttattttcttcagtcatgtgttttttcaggctttcaatggccgcttttgccgttttaacccttgtggtgcggatgaggccttcttcatttaaaattgacatttccggctttttttgttcaccgaaaaagatccagtacaccaggcgtttcagctttttcttagataagccgactttaaacgggttcgtatacagcacttccagttcatcaaaccgttcctgaaggctgtcagccgtttcttccggtatgtcgccccgctcaatcagccgcagcaattcttcctgttcagcctgtatcccttgggcgcggactttccgctcatcttttttcgtgcggtttttgacggtgaactgctgaaacctgagatttttcattttctcattgtattcggcaataaccgcaaaagaagccgttttgtttgtctcattcatattttctttaatggcggttaaggcagcttttatcagcttccgtctcgctgtcagcaatttgactttcttctctttcacattgtcttccggcttatctgtcaaaatcggcagtacgattgtcgccagcaccaatgtgcacataataacacccgcggctaaaaagagaatcaaattccgttcaggaaacggtgagccgtcagagagcacgtaaggaatggaaaaggaacccgcaagcgtgaccgctcccctgacgcctgaaaccgaaatcagcagggtcgtgcgcaggccgggtttataaatgctctgatccttgttaaaaaaccacttgccgttccaaaaaaacagcacccacaaaaacctgagaatcattaacgtcagcgtaatgacgataatgtacccgatgaccatcatattgttaaacgcggtatcattaaagatgacagaaaccacatccggtatttgcgcacctaaaataacgaaaacaagaccgttcagaatgaacaaaataatattccacgtacttgaagagacgatttgcagtttgaccatcgttgattcaagacggtcctgctccaccgcatgcgtgatgccgccggccacaacagctaaaatgccggaaacgccgatttcttcagccgcgagatagatgacgaacggcgtcagaatttgaatcagcatatgcatcgtgacatcctgcatgccgaggcggcgcaaaaacagccggaaacggataatcaaaaaagaaatgacgacaccgctgagtaaaccgccggctgaaatcagaacgaaactgaaggcggcctgcgccagcgaaaatgcgcccgtcacggcagccgcaatcgcaaatttaaaagcgaccaggccggatgcgtcattcatcagtccttctccttcaaggagacgcagaatgccttttggcatcttcactcgccctgacagcgcgctgaccgcgacaacgtcagtcggtgacagtatcgccgccagcccgaacgcggcagccagcgggatgctcggaatcatccaatgaatcgtgtaaccgccgacaatcaccgtggcaaacacgagcccgagcgcaagcagcagaatcggcgctcttaaattccaaagttccgcacgcggcgtccgttttccatcgttaaaaagcagcggggcgataaacaaaacaaaaaacaattcagtattcagttcaaaatgaagcccctgcggaaatgacgccgcaatgataccgagcgccacctgaatcagaggcaccgggataaaggggacaaaccgatttacgatatttgagatcgcgatgatggttaaaagtacgagtacgactaaaaatatgtccaaagcatgacctccttcatctgctgcatcatatattattgcctgttctctgcctttgccaaaggccggagccgatgatcgggcagattcaatatattttccgtacgcaaccattcttcttttattttacccgtttttatttaaaatttctcataacgtgctcacggcgaactttttttgccttcagctacattttttccggaaaaagaaaaagcctgttttctctgaaaacaggctttttcgcaagctgcgtcatctgtttcatgacgcggtgcagcgtttatgctgcttagtaaaggatagagaacgcaccgtcagtgtgtctctatccttggttttaagtgctcatcttattcgtgaaaattcatgccgtctgtcgtcgctttaatgatgcccgcgcggatgacgaaatcgccgaagtgttcgccttcctcacgctctttcgcgtagcgcgggagaatggtgcgaagctcactgagaatttcctcttcaccgatattttcccggtacattttgctcaaacggctgccgtcaaacgccgctcctaaatacatattatattttccgggcgcctttccgataaatccgatttcgccgagcgcatggcgggcgcagccattcgggcacccggtcatacggatggtgatttcttcatcccgcagcccgttttcgtcaacaatgtcttcaatcttatcaatcaatttcggcagatagcgctcggcttcggccatggcgagcccgcatgtcggaagcgcgacgcaagccattgaactgcggcggagggcggaatgctgccggccgtctgtcagaccgtattgttcgattaatgcgctgatttgtttctttttctggctcgagacattgcctataatcaggttttgattagaggtgagacggaaatctcccgtatggactttggcgatttcacgtaatcccgtcatcagcttataattctcatagtccgtgacgcggccgccttcgataaacatcgtaaagtgccatttaccttttacacccttcacccatccgtaacggtcgccgttatggtcaaaatgataaggtttcgcttcatccagctgccagccgaggcggttttccagctcggcttttacgttttccagcccgagacggtcaacagtgtacttgaatctggcattctttctgacggaacggtttccgtaatcgcgctgaatcgtaatggttttttccgctacatcatacagctgctccggtttgcagaagccgatgacttttgaaagctgcggataagtggccgtatcgccgtgcgtcattcccataccgccgccgattgccacgttgaatccgataagacggccttcctccacgatggcaatgaagccgagatcttgagaaaagacatcgatatcattggacggaggcacggcgattccgattttgaatttccgcggcaggtacagcggcccgtacatcggttccgtttccctgtcaggagtgcccgccacacgttcctcatcaagccagatttcatgataggctctcgtgcgcggaagaaggtcatcgctcaatttcttcgaccattcgtatacttccgcatgaatttcagactggtgcggatttgaagcgcacatgacgtttcggttgacatctccgcaggccgcaatggtatcaagcagcgccgcattgattttctgaatcgtttttttcatgttccattttaaaattccgtgcatttggaacgtttcacgcgttgtcagcttcaatgtattgtttccgtatttttgcgccagttcatccatgacaagccattgttccggagttgaaacgccgcctggcatccggacgcgcagcatgaactgataagccggttcaagcttttgtttttgacgttcattacgaagatcgcggtcatcctgcaagtagcttccgtgatgcttcatcagccggttgtcatcgtccgggatgccggctgaaatccggtcgagcatgacttctttcaatgtgccgcgcaaataatcgcttttttctttaatttcctcaacatcacttggagggccttccggcgcttttaaaatgttgttcaccatgctgaataagctcctttcaaaccaaaatcaatatacgtcacgctgatagcgttttttctgctgcatgtctgccaggaagctttccgctttttcacggctcatgccgccttcttcctgaatgatatcgagaagcgcctggtgcacgtcatgcgccatatgctgttcatcaccgcagatgtatacggcggctccctgctgcagccattcataaagctctttgctttgttctttcatgcggtgctgcacatatactttttcctccgaatcccgggaaaaagcgacgtccatttttgtgagaacaccgttttgcagccatttttgccattccgtctggtacagaaaatcagtgacaaagtgctgatccccgaaaaacagccatgttttcccttcagctccggtttcttcacgctcctgcataaaggaacggaacggcgcgatgcctgtccccggcccgaccataatgatcggtgtatccgggttttccggcagcttgaagttttggttgtgctgaatgtaaatcggaagcgtatctcccggctggagtctttccgcacacagaatgctgcagacgccttttcgttctctgccgtgcgcgtcatatctgaccgctccgattgtcagatgcacctcttccggattcgcttctaaactgcttgcgatcgaatagagccgggccggcattttacgcaggatggaaagaaagtcttccgctgtcgcttcccacggaccgaaatcccggacgagatcaagcagatcacggccgttgatgtacgctttcagctgctcttcgtttccttcggccagaagttcactcagcttttggtcagccgtaaactgtgcggccttttgcaggaacggttttgttaaaacggttatttcaaaatgagaagtaagcgcatctttcagcgggaggcgctctccttgtttattcaccgccacttcctgttttgggtcccatttcagctcattgatcagctcatcaacgagcgccggatcattttccggatagatgccgaggctgtctccgggctgatacgcgaggcccgatccttcaagcgaaagctcgagatggcgtgtttctttattcgaaccgcgtccgttcagattgatgttctcaagaacctccgcccgaaacgggttcgttctggaataaacggattcaccgagagccggcgtctcggcaggcgcttcggctgtttgatttcccgctccttcgttcaaaccgccgatgaccgcgtcaagccattcagaaaacggctcatcataatcaagatcgcaatcaacccgcggcgcaagctgtgtgccgccgagctcttgaagacgctcgtcaaactctttgccggtctggcagaaaaattcatacgagctgtccccgagcgccaaaacggagtaacggagcgcttcaagcttcggcgcgcgtctgccgtgaagaaattcatgaaaggccagcgcgttatccggcggatcgccttctccgtgcgtgctcaccacgatcagtaaattgtttacttttttcagattattcggcttaaaatcgttcattgacgcgacggtgacctggaatccccgttcctcaagcgtctttaccgtctgtttcgcaagaccttccgcatttcccgtttgcgatccgtataatacggtcacttctcttgagactgccgggctttctgcaggaaccggagcagcgggtgcggctgtttcaccggattcggaccgggccgcagccaaataaccgctcagccagattttctgtgattctgtcaaggtcggcagaaggcggttaaggagctctgcctgctcctgattaaacggactgttcatgacctgaagttgcaacgatatccacctcacaaggaattaaacgtaacgtacgttatttctataggaattgtcaaaataatattctaattgaaactttaccgaaagtttgtatgtaagtaaaatatataatcatgatgacaatgattaagattactaatgataaaaagccctttgcacttggcaaagggcttacacgaataagccggcgggcacttcttttataaaaggagagggttctcccggagacagcacggtcagatgatgcatcgcgcgcgtacaggccgtatataacagcttacggtcatgttcgcttttgtactgggcagcagaggcatcagcggcaatgacggcgtcaaactcaatgccttttgccaaataaacgggaatgacgcatacccctttttgaaaaggctggttttctttattgatcaagcggacaccgctctcggcgctgactgtctgaaacacttttttggcttccgcggccgttttgcagatgacggcgaccgtctcccagcctttttgtctgagctcccggattgtatccgccaattgttcctgccgcgctttttctgtatccgtccgcaaaacacgcggtttttccccgttccggttaaaaggttcaatgtcatcgccgtcagccagcagcgctttcgtaaattcaacaatctgccgcgtcgatctgtaagtccgcttcaggctgacatacttttctgcaccattgcgaaagcagccggcgagggaagaagggcccgtaatggtgtgggcataaatcgactggctgacatcaccgagcaccgtcatctttgccgccgggaagatgctttgtatatacgtcagctgaaatggggaataatcctgcgcttcatcaatgaagacgtgcttcatttgtgtgttttttctttttccttctaacagatcctgcaaatacagatacggagcggcatcttcatacggaagtgaccgttctgcaaatgcgtttctggtcaaagcgccgatgctctcccaatgatcgggcttttcatcagctccccagtctgaaaacagccggagatacatccgttttatatcgagaaagccgagccgtctgacggcctgcttaatcggtttaaaggctttgcctacaataatggcgccaagcagccgctgttcgcgctgatggtcgtcaaatgcaggttcatcatctgccgcctgcttcttgagtgtttgataaaccacagcatagtcttccttatcaagcagctcgctctcctgcaagacccattccttcttacgctcctttttttcgagagcgctgatttccgcgagaagccattccgctgtcagctccgctctgttcggaatcggcagctgctgatcaagcgaataaaaatagtcttcaatccgttcttttgaaatcaggatgtctccccggaagctgatctgtttacacatcagacccgagccggaaagcgagccggcgtagcggtcaatcatggactggaaagctgatgacgctttgtaagcaatggctgcaagccttacagaaagtgcgtcctggttttgttcagtcaggcaatattcaagctgctcgtacgggctttcacaatcaaactttcgtccgagccggcggatgatatattcctgaaaggtggcctgctccatattctcttctcccaattccggcaatacggcggaaacataactgttgaacaaaatgttcggggaaaacaatacaatctgacgggcatcaagcaccccgcgaccgcggtacagcaagtaagcggcccgctgaagcgccgcggatgttttcccgcttccggcggctccctgaacgatgagatatttgcttttttcatcccggatgatttcgttctgttctttttggatggttgacacgatgtttttcatatgctgtccggaatggccgctcagcacctcttgcagcatttcgtcaccaatcgtcatatccgtgttaaacatcgctttaagcgtcccgtttttaatgataaactgccgcttcagtgtgatgtctccttctatcgtttcttcgggaacttcatagcgggcttttcccggggaatattgatagtaaagagatgagatgggcgcgcgccaatcataaatgagaaattgctcgttgttttcatccatcaaagaagtcagcccgatataaatccgctcggaagaggactcccctttttccgtaaaatcgacacggccgaagtaaggagaggttttcagcttttggattttttgaagctgccggtattgaagccgatgcgtccgttcacgttctgaaagcatttccgcctgctgtttaatgcttgaaaatgtctcagccgcttcatgggcgtcatccatattcacggtgacatcatcccaaaacgtttttctcagcccgacaatatcctgcttcaatccgcccgatgaggcttcaagatgagtttgtttctgttccagttccttcatgacaaaattgattctttcctgctcttctttccactctttatcacgttttgccatcagcggcacctccgacatcaagctgacaaatccggctttcatcatacaaacatatatgcaacatattattcagcattatggtcaaataccctttttcttatcatatcgggcgtctttttttatcagaagccgttatgcaaaaaaaaccgatttcgtttgtgaaatcggtttttttactgatctatatgataggaacgattcggcaggcgccacctgaacacataactgcagatgcggcatgccacaagcacaagaaacagcacatacaaaccggcggcatccccggcccagccgaggcccacgattaaccctccgagcgcggcccagaccgcgtaaatttccgccttgagcacaagcggcttcctgcccgcgagcaaatcccgtatgatgccgcccccgctgccggtgaggaccgctgccgcaatcaccgcactgagcggatggcccattttcacggcatataaagcgccttggatggcaaacgccgaaagcccgatggcatcggataggttgccccatttactccaatgccttaacagcagcttcggaaacaaaaagacaatcgtaactgatgcgagagcgatttgaaaaaacgcgccttgctcccacaaggcggagaccggaacaccgatcagcagatttcggatcgctcctccgccgaacgccgttacaatccccaagatatacacgcctaaaatatcatactcctcttccatcgcaacaatcgctccgctgaccgcaaacgcaatgatgccgattacactaagcagctcccaggccattccatatgctcctttttatttgttaaattttctgacgaccattagattttataatcgctttctcttaaaatcaaccttatttttgaaagattctgattcctaatccgggacaacctcactcgcaacggctgggagcaagaacatttacctattttatactattttgggaggtttattggaagtttcattgaatactttctctaacaaaaagggggttatgagatgaaaatcagttcacttgtttttcctgttttattggccgccggattcattcccggcctgccgtcagccgaaagccatacgcattcgcacactcatgcggagccggcgaaaacggtgtatacggacccgcttccgaaagccgatcattttaaagatctgaagggcccggtccaagtcgaacagacggttgacacaaaaattctggatgaaaacggcaagcaggtcggcacgaaacgattcaatgccaatgtcagtcaggataaagcctcaactaaagccagcacgggcagccagaaggtcaaagtgctggcggtggcggacgctgaataccgcgccaaatacagcgactggcaaacgcgaatcgtccagatcgtggagcaggcggatgttgcttttaaccgtgatcacaacattgatttcgtcgtacaggccgtgcaggcttggaattcctccggctcaaacagttctcagattttatcgaatctccaaggcagcttcagaaatcaaaattatcattttgtcgtcggttttaccgcaaaatcaagttttgacgccggcgggatcgcgtatgtatataacggcaaaccgaacggcccggctttcagcgtgaaccttgatcaaggaacggccaacacggcgaaagcggcacagcacgagttttcccataacttcggacttcagcatgacgcccaaggcagcggcattcgctgcgtcatgaattatgattatgcctattccgtggatatttgggacagctcccataacagacagattgagacaaacaaagcttggtacaaataatagaaaaagagccgctcccatggagcaggctctttattttgccgcgcgttccgttttgacaaaacacatgcagataataatgagaataaatgccgtcaatgccaggaaaggaatggtaatgaaaccgaaccagttaatatattcagatgaacaaggcacgccgtagacacacggcttgatgccgctgaaaccgggcaccttctgctcaaggtaatgcatgatcgatataaacgcgccgatgacggccatcggcagcacgtatttttttacgcgcgtgtcaccctggaaggtggcgattcctaaaatcaggacaagcgggtacatgagaattctttgataccagcacagctcgcacggtatgaattttctgatctcgctgaaatataggctgccgagcatggcagcaagagctatcacccaagaagcatataaaaatacgattctatttttcatttttcagctctttcttaatcgtttttgaaatctcctcataatcagagaattttttaatcactttgtcatttacgtaaatcgtcggtgtcgccgttatgtttaatttatcattcaggtcagtgtcagctttcagctcttttgcaaatgtctctttatcaaggttttccttcagcttgtcaggatcaacctttttcgcggtgcttttgaccgttttttcaagcaatgcaggcgtgacccattcctgttcgcttgacggctgctggtcaaacagcttttcatggaatgcccagaatgatgccgggtcttccttccacacctcttctgaagcaagagccgccagacgcgagccgcttccgtggtacatgacgttcacaaatgaaaatttcacgtcgcctttatcgataaaatcttttttgattttcggaaagatatcgctgttaaatactttgcatgacggacacttgtaatctccgaattcaactaccgtaacaggcgcgctgtctttgccgagcacgggctgtcctttaatggaaggctgttcggcgactgtttcgcccgctttttccgtttggttgttaataattacgatggccgcaaataaaacgacaacgattaacgtcagtatcaccgcaaatttcgcagacgattgtttctttttcactcagacacctcattgtttttaaaataaaaaagaagcggatgccggatggcccgcttctctattttaccaagacaaccttgtttaagaaaaccctgaaaaacgaattatctttgacaattattccgctttcactctcatgacgcgcatcgcattggcaacagcgatcagcgtgacgccgacatctgaaaagaccgcttcccacatggtggcgaatcccaatgcaccaagcaggagaaaaatcatttttacgcctaaagcaaatccgatgttctgccagacgatccggcgtgtgcggcgtgcaatccggatggcttcggctgcttttgacggctggtctgtcatcaggacgacatcggccgcttcgacggcggcatcagagccgagagcccccatggcagctccgatgtcagctctggcaagcacaggcgtatcattaatcccatcgccgacaaacatcagtttttcattcggtgcaagcgccgcttcaagttcttcgacgcggtctaccttgtcacccggcaaaagctctgtgtacacatcatcaataccgagctctcggccgacagcttctccggtctgctttgaatcacccgtcagcatcactgtccgcttcacgccgagcgcttttaaattggcaatggcctgtttggcgtcctctttgatttcatcggcgatcacgatcgcccccgcatactgctgatcaacggcgacatagacgacggttccgttgttttcagctgtgccggaagcgatttgttcttttgccatcagtttttgatttccggctaaaatcgttgatccgccggttttcacccgaatgccgtgtccgggtatttcttcatattcttcaatctcgtctgccgcgagcggttgattgtaagcttcacggatggaagaagcaatcggatgattggaatggacttccgcaagcgcggccgcatgaagcaggctgtcttttgtaaatcccgccgccggtctgatatcagtaacggcgaaattccctttcgttaaggttcccgttttatcaaacacggcgtatgccacctgattgagcgcttctaaatagttgcttcctttcacgagcacccctgctttagacgcagctccgataccgccgaaaaacccgagcggaatggagacgacgagtgcgcacggacaagaaatcacaaggaaaatcagcgcgcggtacacccagtcggatagcgcggctgaaggcacgagaagcggcggtaaaaaggcgagaagcaccgcaacaatgacaacggccggtgtataatacttggcaaacttcgtaataaagttttccgttttcgctttgcgtccggccgcattttcgaccagatccaatatttttgacacggcagagtcttcatatcctttagaggtttcaatatgaagcacgccgttctgattcataaatccggccatcacatcttgccccggctccgcttttctcggcacggattcgcccgttaaagcggatgtatcaaccatcgaggaaccgctcagcacctttccgtccagcggaatccgttctccgggattcacgacgatgacctgtccgactttgacgtcctgcggcggaacggcagtcatgccgttttccgttttcacattggcgtactcaggacggatgtccaataacgcgctgatcgattttctggatcggctgacggccgctccctgaaacagttcaccgatttggtagaacagcatgaccgcgacgccttccggatactgatgaatcataaatgcgccgatcgtggcaagcgccatcagaaaatgctcatcaaatacctggccgcggacaatgttttttcccgctctggctacgatatcgccgccgataatcaaatatgatgcaaaaaagagcagaaactcaaggacggcgcccgtgtgcgcgaagtaagcgatgacggccaaaacggcgcccgctgccaatctcactaacatcagctgcagctttttgcggtattcatcctcgccgggtttgtcttcatgcttcgaacgaacggtcacatgaggatcaatggactttacttttttcgcgacttcgtctttcatccattgctcgtttttgccgccggctgagaccgtgatggtgcttgccgcaaaattgacagcacagccgtctatgccgtcaatggcttttacgccgttttctattttttttgcacagttgctgcaatcaagtccgtctaatacaaattcacctttggctgctttcattttcgactcaccctactttccgtaataggattcccataacatcaatacagctaaacgaatttatatatatgaacatatactcatatatgtgttttctctattatatgcaggctttgaataaagtgtcaataaaaaagacaaaacaggcatcagcccattttgtcttttttcaccttctgtaaacgcaaagcattaaggacgaccgatactgagctgaacgccatggcagcgcctgccacccacggggccagaaagccggccgccgcaatcggaatgccgatgctgttgtatcccaatgcccagcctaaattctgcttgatgtttctcatggtcagcctgctcatgccgatggcgtcggcaatgccgttcaggtcaccgcggatcagcgtaatatccgccgcttccattgcgatatctgtgccggtgccgatggccattccgatatcagccacagccagcgccggagcatcattgatgccgtcaccgaccatcgccacgcgccggccttctttttgcagccgggaaatttccgccgccttttgttcgggaagcacttcggcgatcacgctgccgatgcccgcggcttttgcaatggcttccgcggtctttttgttgtcaccggtcatcatgatgacgtcaagccccatatcattcaggcgtttcaccgcggccggagatgtgtctttgattgtatcggcgactgcgataagccccgccgctttgccgtctgccgcaataagcatcaccgtttttccttccgcctccaagcgggccatgtgaggaagcagcgcctcatgttcgatgtgttccgattccatcagccgtcttgatccggctagaatcgttctgccgtcagcctcggcgtatattccggaaccgatccgggcttggaaccgggtgattttcgggatggcaatcccccgtttttcggctcctgacacgatggcttctccaagcgggtgctctgatcccgtttcggcggccgccgccagccgcaggagttcctcttcgttcattcccgctgccggtacggcgtctgtcagaaccggtctgccgtttgtcaccgttcctgttttatccagtacgatggtcgtcagacgctgtgttttttctaaatgctctccgcctttaaaaagaatgccgaattcagctgcgcggccggagcccgccataatgctcgtcggagtggcaagcccgagtgcgcacggacaggcaatgacaagcacggcgatgaatttgccgatcgcttcagaaaactgtcccggcgcggcccatacataccaaatgagaaaagtcagcatggccagccccagcacaatcgggacgaaaatgcctgaaatgtgatccgcgagccgctgaatgggggcttttgatccttgggcttcttccacgattttaataatgtgtgcaagcgcggtatctttcccgacattcaccgctctgattttgagaaagccgtttgcattgatggtcgccccggtgacggtgcttccgggagacttatcaacaggcatgctctcccccgtaatcatcgattcatcaattgcggaatggccttcaatcacttcgccatcgacaggaacacgttctcccggtttcacatatacgatatcccccgtccggacctcgtcaatcggaatcacctgtaccttcccttcccgctcaaccgccgccgtcttcgcctgaagcttcattaactttttaatcgcttctgatgagcggcctttcgctttcatctctaaaagctttccaagcaaaatcaaagtcagcaaaatggcgctcgtttcataataaagcccctctacatgtccgtctcgtccgagagacgcaatcgtcatgtacaggctgtatgcgtaagcggccgtcgttccgagcgcaacgagaacatccatattggcgcttttgtttctcagcgccttatacgctcccatataaaaaggccagccgatgacgagctgcaccggggtggcaagcgcgaattgcagccacggattcatcaggatatccggcatccagataaaagaagtaaaagaaaaatggctgaccatcgaccatagaagcggaaatgagagaacggcagaaaatatcagcctgatcagctgttttcgctgctctttctccttttgggataatctgccgtctccatcaaccgcttgcttctcgtctaatctgtagccgagttttgccacggtctctttcagttctttcggtgtcacctctttcggattgtattcaacggtgactgtttcaagggcgaaattcaccggcgcgcccacaacgccctctgttttgttcaggcgcttttcaatccgattggcgcaagcggcgcacgtcatgccttcaatctgaaactcggctttttccgtcacaacatggtagccgagtttttcaattttatcctttatggcgccagcttcgattttgtcaggctgataggaaatatttgaggtctcaagcgcaagattgacggaagcgtcattgacgccgtccatccgtttcagtcctttttcaattctagaagcgcaggcggcgcatgtcatgccccccacttgaatggtcatttctttcggttcactcaatgtcctcatctctcttcataaaccccatgggggtataagtatgataaaagaaaaccgcgcccgtttccgcagcgcgataaatcctatacgacgtcataaccttgatcttcaatcgcgtcttttatatctgatacggagactttgttctcatcaaacgtcacatccacctgtccggcttccaatttcacctgaaccgccgtcactccgttcagttctcctactccggtctctactgctttgacgcagtgctgacaggacatgccttcgacttgcagtgttttttgttccatgatgattccctccacgtcttgttttttcttcttcatgttaccatacccctgtagggtatttcaaaacattttattttacgattttgcgatttttttcacaacatcaagcagctcggcaatcgcctgctccccgtttccgctctcaatggcgccggctaagcagtgatgggcgtgatcttccagcagatgaaacgcgactttctgcatggccgcctgtacggctgaaatctgcacgagaatatccacgcagtatcgttcgttatccaccatattctgaatgcccctgacttggccttcaatccgtttcagccggttcaggatctggtctttttctttggcgcttttatgatttaacgattgatgctcggtatgtttgtccattttccacctcggtttttttctttgttatcttcattatacagacttgaaaatccggtgtaaaaaattttcaacacacaagttttaccagtacgcccgcggggtatataatgttatcacttatcaagagggggaaactcattgaaaacgatacaagtcggcatattgggatatggtttgtcgggtaaagtctttcatgcgccgcttttggacgtccttgatgattatcagatcaaaaaagtcatgacctccagaacggaggaggtcaaacgtgatctgccgggagttgaagccgtacgcgcgattgaagacattaccggtgatcctgacattgatctcgtcatcgtcacgacaccgagcggaatgcattatgaatcagcgatgaaatgtctcctggcgggaaaacacaccgtcgtggaaaaaccgatgacggcgacttcagcagaagcggaggaactgagaagaacggctgaagataaaggcgtcttactgagcgtgtaccacaaccggcgctgggacaatgattttttaacgatacaaaagctgattcgggacggggcgcttcaagacattcatacatatcaagtcaactacgatctgtacaatccggttgtccaagaaagatggcgcgaaaaaagcggacccgccacgggaacgctgtatgatctcggttcacatattattgaccagacactcctgcttttcggaatgccggaatccgtcacggcaaatgtgatgaaacagcgggacaacagtgaaaccgtcgattattttctggccgcgctccattacggcaaacttcaggtcattcttcaatccggctccatgaatgcggcaagcggcccgcgctaccagattcacggacggaatgcaagctttatcaaatacggaaaggacggacaggaagctgcgctttcagccggccaaaagccgattgacgacagctggggcgccgatgaccctgacaacttcggagagctgacaatcgcagcggatgaaaaacggcatacagaaacaatcccctctgagaacggctcttaccttacgtactacaaactgctggcagacagcatcttaaacggaaaaccgcttcccgttacggcaaaagaaggcatcgatgtcatccgtgtcattgaagcggcgatgaaaagcagcgaacaaaaacggacgattgccctttaatatgaaaaacctcccagccgtacggcagggaggtttttttaagatcagaatgattttccggcttctttcgcgcgggcaatcgcatcttctttaatttgctgtgctttattcggttcagcattatggccttcaacgattaatccgtcaaaagaaggaacgccgaagaagttcatcatgatgccgatgtaacggtggcccatttccatgtcagccgccggcccttcagagtaatagcctccgcgcgcctgaatgtggagcgcttttttgtctgtcaacagaccgatcgggccttgctctgtatatttgaatgattttccggctacagccacagaatcaagatacgctttcataacaggcgggaatgagaagttccaaagcggtgtgacgaatacgtatttgtcagctgacgcgaattgatcgctcagctcgttcagacggctgactttcgctttttcgttttcagaaagctcttcaaaacctgtgccggattgaagttttccccagccgctgaatacatccgcgtcgatatgaggaatgttttctttgtaaaggtcgatatgtacaacctcatcattcgggtttgattctttataagaatcgataaacgcttttcctgtcgccatgctgtaagatgtcttttcatcatgaggatgagcagtgatataaagtacttttgccattgtaaacagccctttcgttttcaaattacacacacatttattatgaaatatgaatgtctttttatactgatcagttctgtaataattatagttacaaaaaaatcttttcgcaacaataatatctcgaaatcagtatatttttttgaaaaggctgtaagaagtacctccagcaaatcgaaaaaactcgcgttaagcaaatttcgacaaagaaaagaccgattttgaccatgttaagcctaaatcggctgtttcatttcagacagttgtgtggaatttatccatgcaaaatgttcctgctcttatattagagacaaacgaattccgcttcatacgttcgaatttatcacactcttttattgcaggtctgcttgccagtttaacaaacgcttcattttctgttctgtttcaccttcttggcgaggttggtaaatggttaattttagttcaggggcatcgtacacttgaagagtaatatgatccataatcatttctccaactaaaggatgcagcagtgtttttttgccgcaaggagtacctagaacttcatgcttggaccaccaattacgaaactcagggctcttattggtaagttctttaatgatatctttaaaccactcatcaccgacaaaacgtgtataggctaaacgaaattgagcaatcaagcgttgcgcatgatcttcccaattaagaaagaggtctcggtattctttagacgtaaagcaacgccagactgcattacgatctcgatcattcattttattaaagtcaccaaaaaccacggcagcagctttattccagcttactatgttcaatttttcgtcggttacatatgtagggcagtattctaattgactcaatacatttttcaggacgctatttacactttcaacgagaggtcttcccgccttagatagcaatggccgatttgctaataaaaatagatgctctttttcctcttcatttaacctgaatacacgcgaaatagcctccaatacgtctgaagatacctgtatatcacgcccttgctctaaccatgtataccaggttactcctattcctgccagctgagctgcttcttctcggcgcagtccttctgtttttctgcgcggaccaataggtaaaccaaagtcttgaggagataatcgcgcccgtcgtgtttttaagaaatcccctagttctttccttctttctttgtcacttaacatgaacttctccccttataagtagtagttttaataataggataaacacactcctattcccattataaaccttcatctattctaataaatgaaggaggtgagttttatggttttcaaaaatagggctgagcctttcccaaaaggattagttctcctcatggctgcagcatgtggttttacagtagctaatgtctatttaaatcaaacgctcttagtcagtatggcaaatacttttcacgtttctgaaaactatataggaattgtagcaactttaactcaagtgggatatgcattgggaaatcttttattggtaccattaggtgacatttttgaacggagaaaattgatcctaagtttattatctattgtatgtataattttagccgcaactgctttatcaatgaatgtaacgtggctgattgcagcaaacttaattcttggatttgttaccatagtccctcaaattattgttcctcttgctgctaatttagcttcagaagagaacagaggaaaagtgttagggaatgttgccattggcttagtgtgtgggattttaggcgctcgatttatcagtggttttgcagattcccattttggatggagatcaatgtattgggcttcttttgctggcacaatgataatgatcattttaatggcaatgtatcttccaaaaagcaaaggaaatcatgcaatgcagtataaaacattacttgcatctttaggcccgttatttaaaaaagaaaaagtgttgcaaaaagcttgcctgagtcaaggaatgatgtttggttcctttagtgccttctggacaactcttatttttttattaaatacttctccgtattcttatgggagcaccgcggcaggtttaataggtttagtgggaatagctggagcctttgcaactcccatgattggccgggtgatcgataaaaaaggatcaaaatttgctaataccttatgtatgtttatttctttaatcgcttttctgaccttaatattcttaggatattggttaccgggattacttcttggcgcactattagtaacagttggcacgcaagcaaatcaagttgcttgtcaagctgctatctttcaactatctcctgaaaagagaagcagattaaatggtttatacatggtatctacattcttaggcggatctttaggatcatatctaggtgtacttgcttggagcaaatggcattggtatggagtatgtacagttgggatactcatgataggtattgcttttagttccttatttagcttacctaaaaaaagaacagtaaaaaatagagaattcgagaaaggaagtcatatctaatgtctgaaaatacagaaaactacaaaaagggattggaagttctatcaaaaatagatccgcacaactatcaaaatatcgtgaacagttttaaagattcagcagcacccgacttgggaactttggctgtggaatttaattacggtcaaattttttccagaccgggattagatttaaaatcccgccttcttgcagcagttgctggtctgactgctttaggaaatacggaacaattaaaattttatattaacggagctttaaatgtcggatggaccgaagaagaaattgtggaagctatgatgcaaatgttaatttatgcaggctttcctgtcgcattaaataccattttaacaatagctactgaagtattttctaaaagacgaaatcagctgtcagccaatttattggaaggagagtaaaaaatgattattgatagtcatgcccacgtagttctacctgtagaaaaacacattgaaatgatggattcaagcgggatagataaaactattttattctctacgcttgttcatccagaaaaaagtgaaagctacgatgaatttattcaggaaatggatgtactgaatcaaattttaaataacgaaataaatcccctagaagcacgatcaaaagctttagaagaattgagggatgctatcgcaaaatatcctgaccgttttattggatttggatcagttccccttttaagttcctccggagaactgcatgattgggttgagaagattgtaaaagattataaaatgaaggggcttggagaattcaccctgggttcaggccaaattaaaatgcttgagcctgtattccaggcagctagtgattataattcctttccgatttgggtgcatacattccatccactcaatttaaatgatattcgggaattgttcgctttaactcgtaaatatcccactgtccctgtaatctatggccatttgggagggattcattggcagcaagttattgcattaacaaaagaaacaaagaacgcctacctggatatttctgcattttatacaacctatgcattatctttggctataaaagaactcccggagaaaactttatttagttctgattttccatatggtgatccattcctaaataagttggcagttgaacgccatgcttcaagtgaagaagtcgcacaacgagtactaggcggaaatattgctaacctcttaaagatttaacttatttttataacaatttcttagggaatataagtttgaaggattgcattcaacaggttttcattccttacgtcttttaatagtaaagagccgatttactcttaatggttaacggggtaaatcggctcttttcttatccaaaatgctggcgggatccctttaatgacgggaatggcaagcagcagaaaaagcagaaacatttagtttctgctcaaaatcggatttgatttacagatcggaatatccaatccgagattcccccgcagtgtatcggccggatagctttttcggtacagccccttttcctggaggatcggtatgacttgatccacaaaggcttcaagcatgccggggatgtcagagtgaataataaacccgtccgccgcttcccgctgaaaccatgtttcaattaatgatgccacacgttccggtgtaccgataaaatgggttcgcggaaacgcggcttcgcgcgccacttgacgcagcgtaagattccgggctttcgcctcccttttgatacggtctgtcgtgctttgaaacgcgtttttcccgacgtcgcccaaatcaggaaacgactcatccagcggaaaacggctcagatcataatcatcaaaaaatctggccacatatttaacagcgttctctatcggaatcagctcggcgaattcttggtatttcgcttccgcttcttcttgtgagccggctataatcggactgattcccggaaagatccgcagcttggtagcgtcccggccgtaatccgccgcccgcttcttcacatcatcataaaaagccttcgtttcctcaagtgaattggagtgcgtaaagactgcatctgcattcctcgcggcaaacgaccgaccggtttctgaagaccccgcttggaaaacgaccggctctccctgtttggaccggccgatattcagcgggccctccactttgaaatactcgcctttgtgatacaggcgatgcagtttgtcagggtcaaaaaactgcccggtttctttgttgcggacgaaggcatcttcttcccaggaattccacagaccgcgcaccacgtccacatgttcctgggcgatggcatagcgccggctgtggtcgggaaggctttctttgctgtgattgcgcgcggctcccgcctgcggagaggtgacgagattccagcccgcccggccgccgctgatatggtcaagagacatcagctgtcttgcgatggtgaacggctcagtgaacgatgtggaaaatgtgccgattaaaccaagatgggttgtagaggcggcaagcgccgataagatagtgatcggctcaaaccgatttaagaaatgcgggatggacttttcagaaatgaacaagccgtccgcaataaaagcaaagctgaacagccctctttctgcagtctgcgctttttgcctgtaaaacgccgcattcgtgcttgctgtcggatcggcgtcgggatgacgccagccgtccgttgtgccgccgacaccgtgaatcatggctccgaattgaataagatccgtccggctcattttctctccccctttttcccctcgtaatcggcaagcgcccgttctacatgttcaatgccgacttgagtaacggcctgatacacacggctgtcaccgctgccgagttcaacgacgggaacatgacggatgccgtatttcatctgcagcacgtcacgcaattcgtcccgttctgtcacatcaattgtttcgtacgcaatggccttttcccgcaaatatcctttcacttcatcgcaatacgcacagccctgtttgctccagaccacaacgtttacttcatgactcatgttcatccctcctgtaattgtggggccggctgcaccgcttcgcttaacagccggtaagacaatcgtttttcctcagcgtttttgataggcgacaaaatcacaaaatcagtaatgctgtactgaacggataatcgtcgcagctcggcggcagtctcttcttttgtcccggcaattacacccgtcttttgtgtaatcagcttatatggctgcgtgacttgttcaagaaacgcttccgcttgttcccgggaaccgacattcacctttttgccgtcttcgagaatgattttgaccgactcacgcgatacgacgtgtttttccgcttctgcttttgtatgcgcggtaaagaccatcggcgcaaggtgaaattccgccttcgatcctttcggcagatgctcgtcaaaggcgtggcgcgctttttctaacgcagcctcttcaccgtttatgaaataggcgaaaacgaaggaaatgccgagtttggccgcggatatcgcgctttccgcgctgccgccgagcaaaaagaggtcaggcgcatactcagtatgcggcgccggccgcaatgacgcatagcggtgtgagtccggaaaatcatttcggatgaaatgagtcagctcctcaagcttttcttcaaataaacgggcgggctggataagctcccgctgcagcgcatcggttgacagctgaaatccgccgggcgctttgccgacaccaagcgccacacggccgggagcaagagcggacaaaacccggaactgctccgccactttataaggactgtaatgctgcagcatcaccccgccggatgcgagacggatttttttcgtgcttgcggcaagataccccagaacaatttccggcgctgatcccgctatctcttcattgttatgatgctccgccgcccagaaacggtcatatccgtattgttcggcctcctgagccaatttcaccgtttgccgcaaggcttcttctgcggtttggttttccgcggtgacactttggtctaaaatgcttaaacgaatcatacgacaggctcctttatgcgctcttttatgtcataaccgtaatcaggcagcacgcggcggaggaacttcttcgttctttcttttttcgtcttgtaaaagacttcctcaggcgttccttgttccacgattgctccttcatccataaacacaattcggtcggacactcttctggcgaattccatttcatgagtgacaatgatcatggtggcgccggtccgcacaatgttaagcatcacctcgagcacctcgccgacaagctccggatcgagggctgcggtcggttcatcaaacagcatcacatcaggatgaatggcaagcgcccgggcaattccgacccgctgcttttgtcctcccgacagctgattcggataggcgtgcaatttatcctgaagccccaccttggccagttcccgctcggcaatggcgtacgcatctgtttttttcattttccttgcgatcgtcaggccttccataacattttgaatcgccgttttatgcgaaaacaaatgatattgctgaaaaaccatcgccgtctgtttcctcagtctgagaatgtcttttttggtaggctttttgcagttaatgacttcaccgtgcagcgaaatggcgccttcatccggccgctcaagtaaattaaggcagcgcagaaaagtggttttcccggaaccgctcgggccgatgatggtcacgacttctcctttccggacacttaaattgatgccctttagcacgtgatgactgccaaaatgtttctgaatgtttcggatttcgatcataatgcgcctccttgatatctggctgcccttttttccgccagactgtttacagcttcgagaatcagcgttaatccccaataaatcacggcagccccgataaatgcttccagaaatgcatagttatcggatgccgcaatcgtcgccgttcctgtaatttcaggcaccgcaacaattgccgcgatggaagtggtatgcaaaaagccgatgcctatattggtgaagttcggcagcgatatcatgaacgcctgcggcagaaccacgcgccgaatcatctggccccgcgtcaggccgattgaatatgccgcctccgcctgccccgtatcgacggccatgatcccggaacggagaatttccgtcatataagcgcctgccgttaatgacagtgccatgatgacaaacacggcgaccggaatctgattggccgaccagccgagatgaaacgcgcggctgaattgatcggcaatcagcggaacccctaaataaatcagcataatatggagaatcgccggggtgctgcggaaaaaagacacgtaaaacgatgagcaggccagcagccatttgatgcggaatatacgcaccgtgatattgccgagagctatgaaaaatccggcaataatcggaatgaccgtcatcgccaatgtaagcggaacggttttcatcatttgttttatcgcagtgccgataaatggaatgtccagctccactgttctccctccttttcagccgtgcgagctcatgtcaaaaaccgtcacaaggcgcgtctcatctttcttgattcgtttttcggcccatctgaagacacattcaaataaaagggcggccgcataatacagaacagaaagcgagatatacacttctaaagaatgattgctcgatgtaatcaaggtctgtcctctgcccgacatatccatcaccccgatcgaaaaagcgagtgatgtatcttttaagaaaccgatcaccatatttccgatgttgggaaaggcctgcacaagcgcctgcggcagaatgatgcgccggaatgtctgccccccgttcagcccgatgctgaaagccgcctccgcctgcccgcggtcgacgctgttcacacctcccctcatgatttcggccgctcttgccgcgctgctcagcgcatacgtggcgatggccgcatacaaagggtccattttagaggtatcgattccggcgagcgccgtgagcgccggaatgccgtaaaatacaatgaacagctgcaccatgatgggcgttcctctgaaaaaagagatatacagcttcgcaaactgattcaaaacgggaatgcgatagatgcggggcagcgccaaaagcagccccaatagaaagccgaacagcagagacaccgccaatatatacagcgtgacgggcaaatacccgagcaatgtcggcacaaaggacgcgatcatactgatatcaaacgctttttccattgccgatccctctctttttcacttaatattgctcctttgaataatccgcgccgagccacttttcactcagctttttaagcgtgccgtcatcaatgatttccttgagggctttatcaatgtcatcgctcagcgtttgttcatttttgttaaacataaagaacactttggcatttgacagcaccccgccgaccgttttttctttaatcgcgctcgttttgttttggaaatcgacggcaaacggcgtagaaatcgtcgcatcggcgcggccggatttcagctgattggccgcatcgtttgaaccttggcccgcataagcgatttcaaacggactgccgtgtttttcattccattttttcagcacaagcgcgccgtttgacgtcggacttgtaatgacccgctttcctttcaagtcatcaatgccgtgaatgttcccgttttcttgaagcaccgtgattttcagcgggaagttgttatacgcgacttgattgaacagaaattttttctcccgttcggcgcttttctccatttgatgggctacgatatcgactttatgctggccgaggctgacaagcaggttggagaaatccatcgttttaaaagtgaaacgatagtccggcaggcgcctgtcaagctctttcaccagctcaacgtcgtatcccgtcaatttgcctttatcatcaataaagcaaatattcggaaattgagttcccgtgccgaccgtgatgttcttcacgtttttctgattgcctgatgccgcctccccgcccgcgccgcaggctgataacgccgccgttgcggcaattgttaatgacatgaccgccaatcttattttcatgtgatcgccccgttttctgcctcaattatttcgtgaaacttgattttgaataatccgcgccgagccatttttcactcagtcttttcaatgtgccgtccttctcaagcttttgaatcgcccgatccgtatcgtccgccagggtttggctgtttttattgaacataaaatacacctcggtatccagcagcacatcaccgaccgttttttgtttgaacgcgtgcgtcttattttgaaaatcgacggcaaacggcgtggatacggtggcgtcagcgcgtcctgtctctatttggtttgctgtatcattgccgccctgcccggcgtatttcaaatgtatcgggctgccgtgggttttgttgtatgccgtcatataatccgccgcgtttgacgtcgcgccgacgatgacggttttcccttttaaatcccggagcgtgtgtatcgcgtcattatccgccttcaccgtgaggtacatcggcgagtagttatatgggatcttgtgatacaaaaagcgtttctcccgttccttatttttcgccatattatgcgcgatcacatcaattttccggtttccgagacttgtaagcagattcgaaaaatccatcgtcttaaagacaaatttgtattgcggcagctgttcatcaatggctttcatcacttcaatgtcatagccggtcagctcgcctttttcatccataaaagcaatgttcggaaaatcagttcccgtgccgacaatgacggtctgcacgccgctttccgcttttgtgctttctccttgcccgcacccggccagcacgccgagcagcagaagcagacagccggctctgatccgtttttttatcattgcgcccagctcggtgtgcctaacagcgacgcgtcaaaccgctccggtatgagcacctttctcatcatgactccgatgtctccgtctttctcctgctcaaaatacacttcataccccctccgtctgtacatatctacaagccagggatgcttgcgcgccgaagtgccgagcgtgatggccggggccttcagcgtatcccgcagcacgtgttcctccacataagtcaaaagtttgctgccgatgccctgccccttcagctcaggaagcgttgcaaaccaccagacaaacggatattttgacggaggcgtgtcactctcccacggaaaacggatcgtaatggttgaaagaagccgtccgtcccgttcgagcacgacggctgaatgattttcaatattttctgttaccatatcgatgtcggctcgcgccgacggccagtcaatctccaaattgcggatcggctgaaacgcgctgtacagcagctctaaaaactccggcgcatcctttttctcagccaatcgaaatatgtcttcactcattccggtcactctccccgcaaaaatatataattcccatttgtttactaagctttgattgtttatactataaagcaaactgatttatttgactaatcaaaaaaagtaaaggaaaggttcaagaaaattaatgaacagccgggaggggatttcgttggaattacgcaccattaaaacgttccatacgatcgtacagtcaggcagcttttataaagccgccgaaattctgaactactcacagccgacgatttcaatgcggattaaacagctggaacaggatgtaggcgcgcagctgtttgaacggggaaagaagctgaagctgacaagggcggggcggctctttcatgagcgggccgggcagcttctcgcgcaatacgaggtgcttgaccatactctggccgacatcagacaggggcaggcaggccttattcagatcggcatatccgaaccgacggcaagcctgatcttccctgccgtactgcgggggtttttagatgattatcctgacatgtcggtcaatgtcagcgtggatgatgccaatacatgcagccgcaaactgctggagggcgccattgattttgccgtatgcggcgagccggagctgattctggagaattatttcgatccgttttttcatgactcgctcaatgtcatcgtgtcagacagacatccccttgccgccaaagcaagcgtcaatctcgaggatttagaaaatgaatgcctgatttttacgcccgccaattgcccgatccggattcaaattgaacagcacctgcagcggtccatcggcagccgctatcgaaaaatggagctgaccagcagcatggctcaccaatactatgtctgggaaaatatcggcgtctcaatctttacggcgacggcgcattcagaaccgatcgagggcacgaaggtcattccgatccataacttaacaatttcaccgccggtcgggctgttgacaaaccaaaaagaagagcattttgactccgccacaaaagatttaatcagcaggatcatcagccggtttcagcgtgatccgcattaaaaaaacccccgctttacgggggtttttgtacgttcatcttatataatgctccgcaccaagccgccgtcgatccgcaatgcagatccgttaatggcagacgacagcgggctgcttaaaaaggcgacaaagtgggcgatttcttccggacggatcaatcgctgaatgatcgacgtcggacgattttccttcataaatcgtctctccgcctcagccgctgtcaggttttcaccgggataaagcgactccagcatcgtttcgacgccctctgttttcgtggagcccggcatgaccgtattcaccgtcacattcgtcccttccgtgagctcggccagactgcgtgacagcgacagctgcgtcgttttcgtggcgctgtagtgggccatttcctgagaaggcatgacggccgcttcactcgcgataaaaatcacccgcccttccttccgttcaatcatccgctttgcataccgtcgtgtcagcctcacgccgctcatgatattcacctcgaaaaaccggagccactcctcgtcaggaatatcaaagtattccgcaggttcaaagattcctaaattgttgacgagaatatccacatccggatactgctgaaaaatcgccccgcatccttccgccgtgcctaaatcaaatgcggccggatagagacgggcatccggcgtctgtttctctagttcccggatcgtttcgttcaccttttcttcacggcggccgttaatgatcacggccgcaccttctgcaatcagcgaagccgcaatcgccttcccgatgcctgacgtagatcccgtcacaagcgccgtcttccctttcaactgcaaatccatcatccattcctccctatcgcaagtctcttcttatatatggactgaaatcgaaagcctgaaaccttccgtccctattatcggatagaaaaatggatgaggggaagtacgcactttttagtgcctgtccgttgtcccggctgaggctgatcgatttgaatgacaaaccgattccctaactcttcttgagcctcttgaaacagctccaagacatcatcagcatccgaaccgaatgccttttgactggcctcaaaattctcccacaccaaagtcagcggaagttcgatccagcctgtcagacaatcccataaggcattcagattttcaccataaaagtccgggaaatctaattgatcttttaagattcggtgtaaagcttctgtgcttgtaacatcttttccgtctatgatgacgatttccatttacattcactcctttttttcggcatgaaaaaaccgcagtgcggtcaagtgacggcactgcggttcctctgttatgtatggagacggtgggagtcgaacccacgtccagaaacatcgattacttaagcgtctacgagcgtagcctgcatatttcgtgtttcactcgtcttcgtgcctgcgggcgggccttccgagagctagtctgtcagtctcttcttacgttctcagacgggaacgcaagcgtagcctacttggatgtgctcttcacggacacataggcaatgtcaggaagagctcgctgcgtttattaggcagctagtgctaagttttggttaaaacttttagttttgccagttatatttaggtgcgtgttaacgagatcgcctctcggctcgcagctcaagctcgatccatccctgtcgaatccgtaacgtccccttgttaagggtatacgggagatctatcaagctcttgctcaactggctgtactgttattatatcatgatcacagacaaattcaattgggaatgtcttcaataaacagcctgtgaatttgatgtgtgaacagtatagcatacggcagttatcacatcaaggctcaggcatcagaagcctttttgtctgtctctgaacgctctttcgatttcccttttggcgtcttttcgttttaaatcttcgcgtttatcgtatgttttcttcccttttccgaggccgattaacactttggcaaagccgtttttcaagtacagcttcagcggcacgagagaataacctttctcttttgtcaggccgatcagcttattgatttctttcctgtgcatcaaaagctttctcgtccggagcgggtcgtggttatagcggtttccctgctcgtacgggctgatgtgcatgttgtggaggaacacttcgccgcgctcgattttcgcaaaggaatccttcatgtttacgcggccggcgcgaatggacttaatctccgtcccctgcagcacgatgcctgtttcataggtttcttctataaagtaatcatggtttgcttttttgttttgtgataatactttgcctgatccttttggcatgccttatcctcctctctccgcaaaaaccgttcatgtgtgcgatacgctttattttagcaaatggagcgttccgcgacaatgaaaatgcggcttgcgaaagaaagcaaacagagcattttgccccatttgcttttcgcatttacttcttctttttgcgtttttgttttggcgcgttttggaaaccgcgttttttctttttcttcttcggttttgtaaaccattcccctttttcctccgatttcggcggtgaagccggggtattgctgtttaacacacgtttccgcgccggtctgccgcgttttctgcggtcgcctgtcgtttctctcggacggcgggtgcctttcatgccgacaatttcaaagtcgatgtttctctcatctttattgacgtcgacgactttgaccgtgatttcgtctccgatccggtaaacgttgcccgtgcgttcgccgatcatggcgaaatgctgctcgtcaaatcggtaataatcatccgtcataaagctgacgtgcacaagcccttcaatcgtattcggcagctcgacaaacattccgaaattcgtgacggaactgatcatgccgtcaaattcctcgccgattttatcaagcatatattccgcttttttcagatcgtccgtttcccgctctgcatcaacggcgcgccgttccatcgttgacgtatggtcagcgatttccggaaggcgttcggcccacttttcttgagtcgcttcgtccgattgtccgttgatcaaatacgttctgatcagcctgtgaacgattaagtcaggatagcggcggatcggcgatgtgaagtgcgtataaaattcagtcgccagcccgaaatggcccaggctttgcgggtcgtatttcgcctgcttcatggaacggagcatgacggttgaaatcaccgtttcttccggacggtcccgcacttcgtcaagaatgctttgcagcgcgcgcggatgaatgtctccggctttccctttgacgatataaccgaatgtcgtgacgaactccaggaacttttgcagtttttcggcgttcggctcttcgtgaatccggtaaataaacggcacgttcatccaatggaagtgctcggccaccgtttcgtttgccactagcatgaattcttcaatcagcttttccgctactgagcgctctctgatgacgacgtctttaacggcgccttcctcatcgacgagcaccttcgcctctttgaaatcaaaatccacggcgcctcggtccatccgtttcgcccggagaatttcggccagacgttccatgtctttaaacatcgggacgagcggctcatatctttctttcagctcggcgtcgtcttctgtgaggatccggttgacatctgaataggtcattctttccgtcgttttaatgacgctttggaagatctcgtgctctgtcacctcgccctgctggttgattgtcatttcgcaggaaagcgtcagccggtcgaccttcggatttaaagaacagattccgttagacagtctgtgcggaatcatcggaatgacccggtcaaccaagtacacgcttgtccctctttccagcgcttctttgtcaatcggggaattctccgtgacgtaatggctgacgtcggcaatatgaacgccgagcttgtagctgccgttatcaagctttgtcacggtgacggcgtcatccagatccttcgcatccgcgccgtcaatggtgacaatgacctgatcacggagatcacggcggtctttgatgtctttttcatcgatggtatccggcgtgcttgttgcctgctccatcgcttcagccggaaaatctcccggcaggccgtgcttatggatgatggataaaatatcgatgcccggatcatttttatggccgagtatttcaacgatttctccttcggcgttcattctgccttcagggtagcttgtcagtttgacgacgactttatggccttccgcagcaccgttattggcatgtttcggaataaaaatatcactcgtgattttcttatcatccgggatgacaaaaccgaagcttttcgtttctgtgtatgtgcccacgacgcggtcgatgcttctttccaagatgcggatgaccgtgccttcctgtctcgatccgcttgactgggaattgagccgcaccatgacgatatcgccgttcatggccgtattcagctcattcggcggaataaacacgtcgcttaaagaggtatcctccggcaatagaaacgcgaatccctttgcatgcgcggaaatttttccttttactaaattcattttttccggaagcccgtagcggttgcttctggtgcggacgatctgtcccgtctcctcgagcgccaccagcgcttttaccagctctttgaattcatctgcttccgtgatgttcagcatctcctcaagttcctgaacggtaaggggcttgtacgcctcttccttcataaacgcgagaagacggtccataaacgcttctttttccattattcgacctcctgtttgttaccaatcgagtttctctaaaaattcgtacacatcctgatgaacgaggtcccgttctttatcgagcgtaatgacatggcctgattcttcataccatttcagctgtttgtcgtccgtttccacctcgttgtaaatgatgttcgcactttctgtattaatcatatggtcatgccgtgcctgaaccacaaatgtcggggaatagatcatgtcgacgtttttgcgcacatcggcaatcagctcctgaagcgatttgagcgtattcatcggtgttttttcaaactccttcatttccttttcaatctgctccggctgttttccttcgaattttttataattgcgcgcgtaggaaagaactccttcgtacataacctcttcacttttaatgtgcatcggcgcacacataggaacaattccctttatgggtacagtgtaacccaatttcaatgaaaaaaccccgccaagcgacagtccgcaggccgcaatgttttcatagccttcagaccgtaaatattcataaccgtccatgacgtctttccaccaatcttcaggccccgtatgtaccagttcttccggcggaacgccgtgccctttatattgaggcgcgtgacaagtgtagccgcgctcattcaagtagcggccgagcattctgacgtctgccgtatttcccgtaaatccgtgcagcagaagcaccgctttgtctccgcctttaaatgtaaatggttttggtgtcacaattttcatgctcataaccccttttttgcacattcaatttagttttccacagttttgcgagaaacaaacgccgtctctcaacaagaaaaaggcctgatattaaatcagaccttatacaaacattgccttatacgatatacgccagcgaaatcgtcaacacgaaaaacaagactgccagcacaacggttgtgcggtgaagaatcagatcaaggccccttgctttctgttttccgaaaagctgctccgccccgcctgaaattgcacccgataaaccggcgcttttgctggtttgaagcaatacgacaataataagtgcaatactgacgatgaccaataaggtaatcaataatgtgtgcatcccatacacctccagactgactggcctacattgcttctattttacatgaaaaacaaaggcatgtcacgccgtatcggtgcacatcatgtcagaaaaacggaaatgcgtttgaatcttccatcatcattgacttttgtcaacaaagtcgtagtaaaaaagatcttcaaatttcatgtcaaagtaatagagcatttttccgatgaccagctggcccggcctccgctctccattcagtacacggctcagtgtggcgggggatattccgatctccagggcgagctggtttaacgagtagtcattattgaccatatactgcagcacataatctcttctgatctgtatcttttcgaccactttcttcaccttccgttctgtcaaatactttcttatacataagatacggcttttgttaacttttgtcaatacttttccagcctggctattccctttagtcaataaacatactagaatataaatagaccgcgggagggggagagactgtggaaagcttcgggaaacaattgcggacattgcgggaaaaaaggcatctgacagtgaatcagctggcaacgtattcaggcgtgagcgccgcgggaatctcgcggattgaaaacggcaaacgcggggtgccgaaacctgcaaccattaaaaagctcgcagatgcgttaaaaatcccgtatgaggaactgatgcagacggcgggatacatagagaccgtccaggaaacgagagccccgtacgacacgggctgcaccttgctggaaaaagccgaaacgtatgagctgcatgatttatccctattggagcgggagaactggcggcacctgtcgaaagaagacttggttctgcttgataaatactttgcgttcttatcggctgaagccaaaaaaagaacaaatgaagactcatgactttgcacatgtgaggcgatcttattgaacacattcggaaagcaattaagagagctgcgccgcgcccggaagcttaccgtcaatcagcttgccgtctattccggcgtcagctcggcgaccatttccagaattgaaaacgggcaccgcggcattccaaaacccgcgaccatccgaaaattggcggacacattaaaaattccgtacgaggagttaatggcgcgggccggacacatcaaggcatttcaggaagaaatccgcgaaacctccgaaagctatcaatccatctgcgccatctatcagaccgccgttgacagaggcgcggagcatctgccgctgtttgacagcaaaaagtggcagcacttcacaaaagaagatattgaaagcgtcagcaaatactttgattttatcgcggctgaagcgaaaaagcgctccccggattcctcatcctctttttgatcctctcctcaacttaacaagcgccagacgtacgttccctccgattttgcggtataatagcagaagacgaggtgaaaaagcatgaaccaatcagaaatgtgccccagattcgaaaaagcggtcgacatcctaagtaaacgctgggtggctctaatcgtctttcagttattgaacggacagcagcgatttagcgaaattgaagcggcgcttccgaatttaagcggaagagtcttgtcagaacgtctgaaagaacttgaaacagaaggtgtcatcaaacgggatgttatccccgaaacgcctgtccgcattgagtattcattaacggaaaaaggctgcgcattagcccctattttagaggagatatctaaatgggcaacggaatggattgacccctttgactaattgataaaacggttctgtctcaaaagagagaaaagagccgttttttattttttccatatgaaaatacaatatctaagtcgaaggacccatagatcaccatctgaagaaggcacttataatatgcagcgcatcatttaaaagacagatgaaatcaatcagaacaaaatggttttaattgacggcatcaatgatatcacaatttgaccgagcacctgtcttctaaagaaaaggattttctgatttacacagacaaaagcaaaatgaggacacttaactaagagcaaacaaaccacctttaaggaagtgacgaacttacaaaccaatcgattactatcaatcaaaatatcgcttctctatatgaggaatccgttcccgaaatcaaagaaacaatttcgattagcgagtgatcatccaattcaatggttcaagtgctctagaatatcgaagaattttaacagattgtgaaggagcttaatgagaagatggatcagtttattatttaataaataacccatgccttccaatcaaagcatgggtttttatcacttctatcttataggtatgcttactcgcacttgtcctccaccatattggctattacctatcttaagttctccgttatgaaggtttactacattctttgcaaaagtaagccccattccataatgaccattagaatgacggctcttatcatccatgtaaaaaagatctgtcgctttctttaagccatcctgagaaaatccattccctgtgtctgtcaccacaaagagaaagtttgcatagtcacattctgcttgaaccgagacacccccaccctctggcgtatgatcaactgcgttcgtaagaatatttaataaagccctatgtaacaattgacagtctaccttcactttatgcattaggttttcttttttgaataagatgttaacttccttattccctttataggccgatatatcttcctgtaaagcattcgttaactcatcaattgaagctttctccaaattgatcgttagtgactcctccgtctttgaaaggtgaatcaactgatgaatatattgttcaatcctattccctgcaccgaggatatattttgtatattcagcttgttcttcattttgtattgataagctgagtaattcagcattccctttaataatggtcatcggaattttgatatcatgtgccaaagcgccaatttgctcttttttatttttttctaaacgccactgtgcctcgagtgaattttgaagagcatctttcatatccagtaaagaatcgattacacaatcaaactccttgatattcgtaaattcaggtttgaattgcaaatcctgttctttaatagatcgtgtgattatattgagtgtctcaaagtgtttttttaatccattggcaaagtatgttgtcacaataaaaataacggttataaacaaaatgactaatatacacatacttgttagctcatagttaggaaggtattttcttaataaaggcgaactgaaatctgcccgtaatgaatattgcaaaacacagtactcattttttctttctataaccaagtaccctttttgtttatagttaacatatggctttttttctatcttcttttttaccagatgcagatcctcttctttaacggtcccagccgtttctttttttgatttcttatcaagaatagcatacgacattgtatccggaatcatatccggggtcactttatcaacagttgcaagttttggcacaagtttttcagcttctcgttcattataattagctggataggaaaatccagtattcattgcaagtatattaataaataaataaagcacagcgaccacaaccaaactgatacatagcgtcgccatatactttataagttccttaaggagcgttttttttcctttgaaacctactcccatctgtaaccgacgccccatatcgttttaatgggatctgcattgtgctctttacatttcttgcgaatcgttctaataaattcagtaattgttgaatataaggcattcccctctattccgtatatctcctcgtaaatttgttctcttgaaaaaattcttcctttattttgtgctaagaattcacagattttatattcattttttgtaaggttaagtttgtgattattaataaaaacttctttactatcaaaatgaaacaaaaaacctgaaatgactcttttcgactgatgcttctctctatgctctcttcttaaatgggcattaactctggcactaagctccatgataccaaacggctttgtaatataatcatctccgcctgtaatgaggccgttcactattgcttcctcttcagtcttagccgttaggaataaaatcggacaatcaaccaacggccggatctgtttacaaagagcaaagccatctatattcggcatcataacatcaagcaaaattaaatcgtacccttgaaatatatcaagcggctggccttgtacactaattaatgtgtcaacctgatgctgatcacgacgtaaaatattctttatcaggacaagaatgtccttttcatcatcaacagcaaggatattcgccactccatggtccccctatactattcaaaagtttgtctgccttcccatctactaaaccatataagactgacagtgaataaacatattatactaaatatcacaattaatgcacctatatttatttcttggataaaaaaaggtttaagcttctcattgatttctttgaattgtaacatgccgtttagccctgacaatctaactccccaagcccaaggattatatttccatatgatatcacctaaacctgtattcataagtgaagtcattaacagaccagcccctcctataaggacagaagcccccgttccgaacatgaggctaataaaaaaatagataaaataaagagctatactgccggcaacgagccacgcgccacccgatataaaaatagtgtaagataaattcggcacttttaaaataaactttaaccccaataaataactgataattgatatggaaatagagcaaatattcattaagatgagcaatagcgttttactcacataagcaatgattttcggagaagtgcttcccagtaacactttaaatttgcctgcctgttcttctaatgatgcagtcattccgcaaagcaccccaatgagaagaggcatagcaactgcgatagcttccataaaagttttatactgttgaaattgactctgatttctcccataaaaataaagaataaatacaactgaacatactagaggtataagaatatgcaaccaaataaaggaggtgttctttgttttctggaaatcagcttttaagcacctcaataatagtctcaacttacatcgcctcctgcttatttgttctgtaatctttggcaggagcaaacgaacggctggtcagaaatgcaaggatcaacaataagacaatagaaatgaatacagcagaaggtacgaccgcccaactaagcaaaggatcatttttttcaagcagcaagccgttaggatgaataccaatagcggggcacatcattcgaattggccaactccaaggaataaaccaccaaaaagcacgagatgctggcataattcctaaaactaaagcccctatcagattaaacatgacagctattgtgaatccccactttctagctacatataaacagagagggatttgccaaagacttgttatccaaagtaatatactcgcagcaataatagaaagtgaaacgttggacaaatcagctataacgaaacccataagaaacataaaaattaaaaatacaatctgagatattagtgaataaatcataataattataatctttgcataccataatttttctaaatctacaggcaatgagtacgtaccgttataattagaggcccttttttctttttgatgagataaagaacaaaataatgaaatcatcaccggcataaagataatagaccaccagttaaaagtacctgatacaaaaaattgaatgttcattaaaaaagaaaaaactatattaagaagaggtacaaaaataatcattcttctagaaaacgttcttttaaacttcaggttttcggcttttatataatttttcatttttttgcacctcctttttcacgacttgatttgacaacttccataaacaattgctccaaattatcagctttatttatttctccttggtatcccagatggccgtcgctgataataccaatatgatctgctatttgctcgacttctgaaagaatgtgactagataaaataacagttattccttctagaggaaatgagcgaataaggtccctaagctcctgtataccaattggatctagcccgtttgttggttcatcgaggattaataatttaggatgatttaataaagcaattgcaattccaagccgctgcctcattcccatcgagaattgtcctgctcttttctttccagcatgtaacatatcgacagtttcgagcacgctgtttatccgttcctttgaaagaccgagcagcgtagcatgtactttcacattttcaaatgcagttaaattatcataaagaggtggagattctattaatgatccaatattttttaaatcagagcgtttccatttatgtccatcgaagaaaatctcgccagaagtcttccgtaaaattcccgttaaaattttgagtgtagttgatttcccagctccgtttggtcccaacaaaccataaatgctatttttttgaacggttaatgaaacatccgcaactgctgtttcttttccaaacttttttgtaagacctttggtctctaataggactgaactcatgtcactctctccctttatccttttcattatttattataatcgctttataatactcactattgcattcaacaatgatttcgtctttagtatcaggatgttcctttgtactgtatacctttccatagcggaatggatttttatcccttattttatccggatccatatagatataaggctctttcagttcttcttcagaccatctctttccatcgccatcaacaaaaaaagttttgcctattgcccctataacttttcctttaatatctttatcaactttatcctgcagctgataaatcttgccgtcatacaccacctgatcatgttttccctggtcaatcagactctccgttgtttcagatgtttcgttctcattgtcatcagtaaaatgcattgttttttttgtttcttcataaactttatctttaaactttgttaatgattggcatgcggacaacataaataaaacaataaagcaaccaaaaacaattacacatctttttagaaacactatacatcacctcactcttatgaaatttcctccaaaaagatgttaaatataaaaaatggatcaaagattctttgccatacgaacaaatatctttgtaatagagcttttcttatcgaatgatgattattctaaaatacttttatcaaaatttaatcaaaatgcatttccagctggaaactttaagtatttggcctacagcgactcgattatatgaccatataaaaagagtgtgatcaggcaacattccttacttactttagatggtttaatctcttttttcatccgtctaaaatatgttatcttgagaataccaacatagtaaaaccgtctttgtatttggcggaaagactgtggatataactacagtcatcgaatgacttttttcactcctgtctatttatcaacagtcaaataaaaaacgagtgtgaaattaaagctctttcacactcgttacttaattgtaaaaatatttttttgcgttctaactctgggaaaataattatgtataacactgagaaggcaagagtcagaacaaaatcctggttttttacttatttagagatatggcagttacaagtaattgtttgaaggaagcaagtttgcaaaacaccagttacacaccctggtgtacaaactgattcacttttccattgcggagtgatttttgagtcttgtttagatacttttacaacatccaaatcgaagtcatcgaactttgacatattagtcacctcctttcaatacctatatactatcagacaaatatcaagattttatctttttttactttttattcaaattaataatgcttttgtccataagatacaacttcagccagatattcgttaatacgagcgataaaaccattataataggcaaaatctttcgataagcagacagctgccagtccaatacctgctgctcccgaaaacattgacggagtttgcagccctttttcttttatttcatctactaacatagataaatattgatgtcccagctcgtcccatccttcagcaggaaaatgagcattcaattcaccgtacagcatacaaatgcctggtatgccatggcttaaagcagtcgacttccaaagaataagcggaactctaccaatactatgaaaattatctttttgattcacaattttcagcacttagcaaatgttggaaaacaaaggtagcaagtttgcaaaggaccagttatacaccctggtgtacaaagtgatttacttaacacttgaggagtaatttttgagtcttgtttagatacttttacaacatccaaatcgaagtcatcgaactttgacatattagtcacctcctttcaatacctatatactatcagacgaatatcaatattttatcattttttactttttattcaaattaataatgcttttgtccattctgtttttgatcctaattccatatttaaaattcctagtcctacacctattactccatccaatagaccaacgtactgtaaaggaactactttgttcccttctaacgattcatagttatggaacccaaaaatataatttttatcatagaaactaacaatctttcgtttaatcttttcaagttcatctttaaaatgctcctgcccggtcagttgattcactccaagcaaaatctgagcaattccgctaaaaccatggcatatggtaggtgaaaaaattccttgtatatcagagattgtatactttaaattctgtactccgagatttatatattgattatttcgaagggcttttccagctttaacaagcgctaaacaaacaccaggtctcccataacaccaagcatctctgctaaaatttactgtacttggctgtaatccatattgatactcttcaaagcttatgattcctttccaatacaaatgatctttatcattttgtgaaaactctagaagaaactcgaccattttttcaacagcatgctcttgaccatttactttaattccttccataagcgctgaggatagaatacaaataggaccaggtattccatgtgctaaaccgatattaaaattaccgtaaggataagattttttttcaatatcagtaaactgatgtagagatggaatatgccaacccgggactttttctcctttcacattaatgtcttctgttaacctaacgagatattttaaaatttgaattaacaaatccttcattctcttatcttcctgaaacaacaacaggtagctcgcaattccgctgacaccctctataacatcgtaatcagtcatataaagttgtctctgtttatattcatttagcaataaaggtacaacttcagccagatattcgttaatacgagcgataaaaccattataataggcaaaatcttgcgataagcagacagctgccagtccaatacctgctgctcccgaaaacattgacggagtttgcagccctttttcttttatttcatctactaacatagataaatattgatgtcccagctcgtcccatccttcagcaggaaaatgagcgttcaattcaccgtacagcatacaaatgcctggtatgccatggcttaaagcagtcgacttccaaggaataagcggaactccaccaatactatgaaaattatctttttgattcacaatttccagcactttatcgaaatttgacatttgacgagcaatttttttaacagtttcaatttctatccctgatactgtacttctgtccatttacttcgttcctcctctagtggattcatgtagttttcggactcatccatctttttatacagcggacatgtttttaataactcttcatgtttgcctattccgacaatctctccattatccatcacaatgattcggtctgccaatttagctgcaaccaatcgatgggagataaatattcctattttatccttagacaaactgaaaaaggtatcgaagatttctttttcagcaataggatctaaagcagcacttggttcgtcaagaatatacatagaagcctctctaaaatatgctcttgccaaagcaatcttttgccattgtccaccggatagctgtcttccttcatcaaaccatagtccgagctgtgtatcgaattgataggaagagtggctttttaagaaatcgaccttcacaatatcgagaacttcatgcattttgtttgtttgatgtagtttatcaatttgtccgaatcctatattttcttttaatgtcatttcgtatttcataaagtcttgaaatagcgctgcaatttggttcatataactgtccatatccagttcttttatatttattccattaattaaaatgtcgccctgctgaacttcatataagccggtaagaagcttaataaatgtacttttccctgatccgtttggtccaacaatggctacacgttctcctttatgcaatgagacattaatatgtttcagtgtctgttctccttgattgggatagataaagctgacattttgaaaaacaacagaatcaataggctcaacaatttgtttcttgtgaccttcatttttctcttcttttaattccagaaactcatacaattgattcatatagagattgctgttatagatggaataaatgcttgtcataatagattgtgagtgattttgcaccagagaaaccgatctgatataactcattacattaccgaccattatttttcccgcgaaagccgacatgatggcaataaagataatgacagctccaactaattgcactgcaatctcatatatgaggtttaaatacgttttctttctcaatatttttgtatcttgtcctataaatgtttttttgatatcccagtacttgtttaataaataatccttaaggttatacaattttaattctttaaaagaaaagtcatgtgtgagtatatagctgatataccatgatttcctttcctgtcctgcccgtttccagtgtataaaaaattcttgctgtccaatcttcaagaaataaaatagagaaatcactggaataactagtaatagcagggatactttagggttccatgacatcaaaaacgcaatggatgagagcagcgtcacacatgatgtggtcattgtgatgatggcttgaataatctgatagggcttataactaatctcttttgttaccctctctaacttgtcatatatttctggattttcgaaatccttaagagctagattactgctctttttcatgactttatagttaagtttatagccaatatttaattgaaatttaccattataatattctgaaatctgcgaaatgagttccgaaaaaaacgatacccctagatatgtcaagaaaatgctgataacaattgaaacatctttctgaatagtcacaagggaattgatcaattcttgtgaaatatatagtgacacaataggcaaaataccagtaataatactgaatacaatcaactttataaacagtgccctctctaaggtaaaaatcaatttgaatgtcttaggcatttgtttcatgataaacagcagctcttttagcttcagttgttcctttacttccatgctaaactaccattcttcttatgatatcgctgcgcatataatgaatgtctgcaaagtgtaagtattttattttccatttctctatcggttccgaataaacgattgcaatgcaggtggattacactacctatacgtgaaaatactgcttctttgttattaaattccttttttattaaacatgcgtaattagctgcagctatctttcttactttcaatatttcgtataatattctgccatcacttgtttttctgagattatcccaatctctatcagagttgcatatttcaatatacttttctctatccttcttaaattcagtacgatactcattctgcagacaatttttctctaaaaaagttaattgctcttcaaacgtaagctcgaactgttctaaaaattgtatgacagaaaccatacctgcgatttcattgcttaacgcaatgtccttcatccgatgcattctaatcatcgtttcaacaactttactatcttcacagaaaagctcttctgccgcatccattagttctggcccgccatatcgttctatctcccgctcatattgggtgataacaaactctgtaaccagccctttttctcttaagcttttcagccaattcaataattgtggaaataagctgtacagcacttctacttttccattaaatctaagtcttatatgtggctttggatctcgatatctcataaagaaatgccttactggaaatttacgggaagtttcgttataaaaatcagctatttcaaaggcaatgagctcttcttctctagtttgtttacaataaagtttaataaacagccaatcttcaaaaggcattttaattctttcgaacctattttcctctatcgagttaaagatcggtaaatccaatggtttttctggtttatttctgacaagcggaacgacgatttcccccgaatagacattttggtttctatcctttaaagcatctgcatcatgctcagcagctacaagttgtaatggctggttgtgatccgtttttttaagttcccagaaaaaaacatccaaagtacgatcatcctctatatcaattaataatcgattatctgcgttaacgatataaaatgtttgcggaaggttataagtacagtgaaattcaaaaaaagcagttttcgcctcttctatcgatgaattcgaatgcatgcttaaatcacttttgtgtaccaaccattgttcacatgataagattatttctttatatttgatttcaggaatatacttaaaatcactgtagatgctcaaccacgggaaattattccattcccttttgccgtctcttgaaatttctaataaaaaccttaaggcgtttggcattaataaaggattaaacatatgatttgattcaaaagaaagaatttcaccagtacttttatgtctggcataaaagatttggtttttattgatcccaattagaacatcttctgctttaacagaatcactgtgatgcaggacactgtttgtaaaaagagtcatttctttttcccgatagttttcattccttgttacatttccagacctgacctgattaggtacgatactcaactcacaaatttttactttactgtctattatatccttttctttgttgtgtatattttttatgacagtactgattgaatcagataagtgagtaaatcttccaaatgttttcccagcacgcgtagatccgacattgggccctaaataaagcaggactctgccattacgtaatttaagaaagaaattgagttcgaacgacaccggaatttcttcatctgcaatttcagagttgcatattctatggaatgtttcatcgtttagttgaataggagttttctttctaactgattcaaagtattttctcataaaaaattgttttatttcaggcgaaaattgctccccaaatgatgtttcttcgaagaattcattagaaggattcgtgtaagtagcaggagcaccaatgcccgcactggaacaaagcatttctaaaagaggaatctctctttcatacccataacgctccaaaaacacatttttgtacttttctaagtggtctaatctttttgcgaaggggacagccatataagtaaacacgctagccaattcacttatcgcaagagatgtttcattatctagttgaatggagaagtcatctaatccagtgtccacttgcaaaggagatgaagtctttatgagttcgttcattgtctcaatcagatttaaatacttgtactctccctttccgatagtgatccggttatattcatctatttgatattgaattttcctgcaagcccgaagaaactcatttggaatttggctgctttccgcttgagcaattaaatactgaaattgatctgaaacagtcattggcggccgtaaatttgatatcagaaactctttgtcaataaggtcttctacatattgattaattttgcttattggggtattttcatagttctctgtcaaactacgaataatttcttgataagcaacacattcaccacagagttcatttattagataaaaaaccgatgttgcacgaacactaacctcttcagattttccatctgtgctatacaacaagtaagcccgatcacctttgatgtaacaagcgggatttattgtaaaagaaagcaactcagtgtattcgctctctagttttttgattaattgatagagccattcaaaatcaacccgagcttttttgtaaaatgaatgctgattgaaagataattgattctcattagaaaaagacccaatacccactgcagaaaaaaggccaaagggtgttgttcttgttgctcgtctaattgcgtacttcaaaattgcctgccggaagttccgcttttttttcccttttaatttatccggtgactgaatgaaagtattcattgtgtcatataatgtcttactagataccagtatttgttcccgaaagagtgaatcactgccaaagtcatgcaacaactgatcggtatcctgaaagttctcatttttcaagacatgatgtactaaaggaacccgaatcatataattattttcaagtgtatataaggatttcatattagtctatagcccccctatgtattcactgtatataaaaactattcaacattttcccgcgataacctccatttaattctattttatgaaaattattataaatgtactatttataatatacatttggaaaatcaagaaagtatcaagatatagcccgataaaccccatataaaaaggattcttttcccctaagaaaagaatcctttttttattctaaacacctataagctttttttcacttttttgtttcacttgatttaacattctttcaatccagaccatcattaaatcagctaataccgccatcagcgcggtcgggatggcgcccgccaaaataatggcggttccgtttgtcgcgttcgaccctctgacgatcatatcgccgaggccgcccgccccgacgaaggtgccgatcgccgtgatgccgatggcaatgacgagcgccgttcggagacccgccataatgacggaaagcgcaagcggcagctccaccatacgaaggatttggtatttcgtcatgcccatcgcttttcccgactcgagataagcgtgctcgatattgataatgcccgtgtgcgtatttctgagaatcggcagcagtgaatacaaaaacaaagccgtgatgaccgtattggcgccgagtcccatgacgagcatcaggacggcgagcatcgcaagcgccggaacggtttgaatcacgttcgccacagcaaacacccagccggcgagacgcccgtgccttgctgtcacaattccggccggaatggcgagaatggcggcgaaaacgacgccgtacgccgacatgagaaagtgccgccagcactcatacagaacataactgccgttttgagcataatacgtaaacagctccttcatcgtgtccatccgcacatctcctttccgttattcaaagtaatgatgtttttctaaatattccttggccacgacggacggctcttttaatcggccgtcaacttcgtaattcattttctgcatcatctttgtatcaatcgcgccgatcatttgattgatcacgccctccagttcgggatgctcttttaatacatgatccggaacgacgggtgaacagtcatacggaggaaagaaccgcttatcatccttcagcgttttcagtccgtaagcgatgattcttccgtcggtggaataagcgagcgcgatatccatctttctgcttttcagcgcgtcgtaaacaaggccgatctgcatcggatacgtgccttcaaatgacattccgtatgtgttcataaaatcctgatatccgttgcctctcagcttcatccaatagttatcgacgccgaatttcagatgagacgcttcttttttgacatcggataccgtttctaaatgatacttgctggcaagctgtccggaaacggtaaagacgtatgtattatcaaagccgtaagaatcaaaccatttcatgtcatatctgttttgaaattcacgctgaacgagccgcagcgctttgtccgggtctttttccggctccatgcgaagcgtcccggtcagcgcgtctcctgtatagcgcgtcgcggcgatatcaatatcaccgtttatcaaggattgctgctgtacggcattggagccgagatttttaataacggatgttttcaacccgctgtgatgttcgatcatctgtccgagcatgctcgcgatgatttccgattcggtcatgctttgcgcgccgattttaatggtgtcctccgatgcggcgctcaatcccgggagcgagcatccgccaaggagcagcatgccgatacaggcgatggcgagcagccgttgtttgcatctattccccatgagagacctcctccttatgaagcgtcctttatgcttttcagcccgtcaggcgtgactttccgttctgtcatccccagcatgtaatcgacggctgccgccagcatcgtgaccggaacggcgcctgcgataatatactccggctggtaaaggttcaagccgataaaaatgtaatctcccagcccgcctccgccgataaaggaggcgagcgtcgcccagccgattaaataaatcgaagacgtcctgatgcccgccatgatgaccggagcggcaagcgggagctctacaagcctgatctgctcccatgccgtcatgccgattccttttcccgattccagaagatgccgattgacgccgagaatccccgtatacgtgtttctgagaatcggcagcatggaatagaaaaacagcgccgcaacggccgggatctttcctacgcctaaaagcggaataaaaaacgcaagaatggcaaggctcggcaaggtttgaatgatgttgacgatgccgatgacggcgccggctcctcttttcatcctcgtcagcacgacgccgagcggaacggcggcgagaatgcccgccatgacggcgattaatgagatgtacagatgctcccatgttttataaaacatctctcctccatttgcctgtaaaaattgcacggtctgattcatatcaattgaagcctcctcatgacatcaccgcgagctgattctcttctccccagatggagtcatagacgatgtcaacgaggcttgcccttgtcacgattcccgttagccggccggcttcatcaaggaccggcacaaatttcatgcctctttttaaaattttatggacggcgtcgcggagcagagtgccgcttctgaccgtgtacagatcccggtcaagcacttccgcgacggttaccgcttgtcttcgtttgcggtcaatcatctccacatcgacataaccttggagaacgttcttttcatcaatgacgagcagcgaatccacccgctcggcacgcatcagctgaatggcggctgacagtgttttctcaggtgttaccgtcacgggatcgggattcatgatctgctccacccgttcaatatcagggctggatgattggatcagccgttccttgccgataaactcctcaacaaattcattcgccggaaatctgagaatctcatcaggcgttccggcctggacgatttctcccgctttcagaatgacgattctgtccgcaagcttgatggcttcgtccatatcatgggtaacaaatacgatggttttatgtaaggttttttgcagttttttaaattcttcctgaagggaatctctcgtaatcgggtcaagcgccccgaacggttcatccattaagatgagcggcggctctgcggcaagtgcccgtaatacacctattcgctgctgctgtcctccgctcagttcatgagggtaacggtctaaatattcaggccccatatcaacgagctttaaaagctcctgcgcccgttccttccgtttttcggcaggatgctttaaaagcttcggaacgagcgtaatgttctgctgaatggtcatatgcggaaacagcccgatctgctggatgacatagccgatgcttcttctgagttccaccgggtcttgttccataatgtttcggccctctatcaggattctgccttctgtcggttcaattaagcggttgatcattttcatcgtcgtcgttttgccgcagccgctcggcccgataaaacaaataaattcgcctttggcgatattcaggttgatgctgttgacggcttttttcccgcctttatacattttcgagacattttctaatgtcagcaaacactcacacctccatgattaagtttattcaattcgttaaattcaaatttaacttttcagacaattgaacgtttcccattataaattaaactttgtaaattaaaaagtttacaatttgtccatattatatataaaggttgtgtaagcactgattaacccgtattgaccggcaaagttcttcttattgctccggattactgccaaattctctcggaagagcatttccgccggtttaaaaatgtggtatattgacatcggaattgctgactgaaaggattgaaactgttggagaaagatccgttacacgtaatcgaacaagctgaagatcatttgatagaacgaatcgctgaaaatatgcatacattcggaatgcccgcgacggtggggcgcattttaggcattatttatatgaaccgcaagccgatgaccttaactgaattatcagaagcgaccggcatgagcaagacgagaatgagtcaggcggtccgtgaaatgcttgacgtcaatctggcggaaaaagtgtttgaaaaaggcgtccgcaaagatttatacgacgtcgagcaggattattaccaaacctttattacgctgtttacggccacctggagcaaggtcgtcagcaaaaataaaatgatgcataaaaagctgaaccgcgaactgacggccgtccttgaaaacggcgtgccggaagaagctgaggaaaaaatcaacgaactgctgaaagaattaaaggattggcttgattactacaactggatcagccgtctgatcgagttttttgaaagcgaagaaattttcaagcatgttccgaagccataagaaaaaaacgccctgacccgcaaggcgtttttttcatgccgcattcggcgctttggttcgttttttctttctcaccggactcagcgcccgctccagccatgccatcacaagatctgcgataacggccatcagcgctgtcggaatggcgccggccaaaataatcgcggttccgttcgtggcgtttgagcccctgacaataatgtcaccgagtccgcccgcgccgacaaacgtaccgattgccgtaatgccgatcgcgatgacgagcgccgtccgcagccccgccatgatgacggaaagcgcaagcggcagctccaccatgcggagcacctgaaatttggtcatgcccatcgcttttcccgattcaagataagcgtgttcaatgctggcgattcccgtgtacgtattccggatgatcggaagaagcgaatataaaaacagcgacaatatcaccgtattggcgccgagccccatgacgagcatcagcaccgcaagcatcgcaagcgccggcacggtctgaatcacgtttgtcaccgcgaatacccagccgcttaatgttctgtacctggcaatgaagatgccgagcggaaccccgacgatcgccgcaaataaaacgccgtataccgacatgagaaaatggcggtaaaactcctgaagcacataggcgccgttttgagaataataagtgccgagctgctgcagcacttccatttgctccacctcatttcttattcaaaataatgatgtttctccaaaaattctttagcgacgacggacggttctttcagcttgccatccacctcgtaattcaattcctgcatcgtttccgtatcgattttgccgatcagtttattcacaatgcccttcagttcaggatgctgcttcagcacgctgtcgggaatgaccggcgaacagtcatacggcgggaaaaactgcttgtcgtcttttaaaattttcagatcgtacgctttaatccgtccgtccgttgaataggcgaggacggcgtccattttcccgtttttcacggcatcgtatacaagtccgatctgcatcggataggttgtgccgaattcaaaaccgtacgtgtcggtaaaacctttatagccgtcaccttttcttttcagccacgcattgtctacaccgagcttaaattgacccgcatgcttcttaatatcggacactttgtctaaatggtcttttttcgcaagctctttcgtgacggtaaaagcgtatgtgttctcaaatccgtaagaatcaaaccatttgtaatggaagcgtttctcaaattctttctgtacgatggataatgcttttttcgggtctttttccgcttccatgccgagggtgctcgttaaatccgttcccgagtagcgcgtcgcggcgatatcgatttcaccgccgagcatcgcttgctgctggacatagttcgatccgaggtttttaattaatgccgtattcaagtctgtattgtgctcaatcatctgtgcgatcatattggcgataatttctgattccgtcatgctttgcgccccgattttaatcgtatcatcggaagccccgctcaggccgggaagggaacagccgcctagaagcagagcagctgacagcgccagtccgcacatccatctcttttggtttcttttcacaacagccaactccttatgatacttccttcagtcctttcagccctttcggcgtcaccttccgttccgtcgccgccagcagataatcaatgataatggctaaaatggtgaccggcacggcgccgccgataatatattcaggctgatagagattcaggccaataaaaatatagtctccgagcccgccgcccccgataaaggaagcaagcgtcgcccagccgatcagataaatggtggatgtgcggatgcccgccatgatcaccggaaccgcaagcggcagttccacaagcctgatctgctcccagaccgtcatgccgatgccttttcccgattccagcagatttttgtttacgccttgaatgccggtatacgtgttccggagaatcggcagcaccgaatagaaaaacagcgcgacgatcgcgggcacctttcccacgcctaacagcgggataaaaaacgccagtatcgcgagactcggcaaggtctgcacaatgttgacggcgccgatgacggcgcctgcgccctttttcattctcgtcagcgccactccgagcggaacggcgacgacaatgcctaatatgacggcgataatcgaaatgtataaatgctcccacgttttatataacagttctccgccgttcgtctgcaaaaacttaatcatttcattcattgtaagcgttcctccccttgtcagcctgtcaccagctggtcttcctcgccccagattgaatcgtaaacgatgtcgacaaggctcgctctcgtgacaattccgactaaatgcctttgttcatcaacgacgggtacatatttcattccgcgctttaaaattttgcgtacggtatcgcgcagcagtgtcccctgctcgaccgtatacagatcagagcggagcacgtcgccgacgaggctcgcttttttccggttctgatcaatgatttcgacatccacatatccttgcagcacattcaggtcatcaacgacaagcagggaatcgacacggtgttcccgcatcacctgtatcgcctgcgaaagcgttttgtccgccgtaacggtgacaggttttttgttcatcatctgctcgacgcgttcaatatccggtcttgattgcaataaccgttctttgccgataaattcttcaacaaactcattagccggattcctgaggatgtcatcaggagtgccggcctgaacgatctctcccgcttttaaaatgacgatccggtcagccagcttaatggcttcatccatatcgtgggttacaaacacaatcgttttattcaatgttctttgcagttttttgaattcttcctgaagggaatcccgcgtaatcgggtcaagcgctccgaacggttcatccatgagaataagaggcggttccgctgccagggcgcgcagcacgccgattctctgctgctgtcccccgctcagctcgtgaggatagcggtctaaatattccgggcccatatcgacgagcttcaaaagctcccgcgcccgttccttccgcttttgttccggccatttcagcagtttcggcacgagggaaatgttctgctgaatggtcatatgagggaaaagtccgatctgctgaatgacgtagccgattttccgtctcagctccaccgggtcctgctccataatgttttcgccatcgataaaaatctttccggatgacggctcaatcagtctgttaatcattttcatcgtcgtcgtttttccgcagccgctcggcccgataaaacaaataaactcgcctttttcgatatttaaatcaatgctgttgacagctttttttccgcctttatagacttttgatacattttctaatctcagcaatctgcgcacctccgaagggttccgttatttttctgaaaagtataatctttattataagatgaaatttgtaaaataaaaagtttacaatgtgttgaaattatatacaatatacgtattttttcatgttatcccgctgacaatgcggatgttcttacaatcgctcccgatagctcgcatatcctgccgcatcatctttttcatcaactgtaaaaaatatgatatattgtcagcatgaaaagccagtgaagggatgatcagccgtggaaaaaaacgctcttgatatcatcgggcatgctgaagagcatctcattgagagaatcgccgagaatatgcatacattcggaatgccggccacactgggacgtgtgctcggtattatttatatgaaccgcaagccgatgacgttaaatgagctgtcagaggcgaccgggatgagcaaaacgaggatgagccaggtggtccgcgaaatgaccgatgccaatctggctgaaaaagtgtttgaaaaaggcgttcggaaagacctttacgacgttgagcgtgattattaccagacgtttatctccctgtttacggcaaattggacaaaggcggtcagcaaaaacaaaatgctctataaaaagctgaaccgcgagctgactgagcttctggaatcggaaaatctcagtcccgatattgaagaaaaagcccgtcagcttttggatgaactgacggattggctccattattatgactggctgagccgtttgatagaattttttgagagtgaagaagtgtttcagcatgtgccgaaaatagaaaaaagcagcacccgaagataaccgggcgctgcttttttaagtcaggaaaccaatatcgggaacatgcctttcagaccggcgccgatcatgccgatcgccaccaccgccaaaatcagccccatcagccgggtaatgacgttcatttcggttttcccgagcttattgctgatgaaagatgaatagtgaaagaagatgaacgtcatcgcgatgacggccgcaatgccgataagcacgctgatgtaatggaagatgccgccatggccggctgacagactcatcaccgtcgcgatcgtaccgggtccggcgataatcggaatcgacaaaggcgtcacagatatatcagctttctccttgctctcccctttctcttcatgatggagagactgcacatgagatttcttcgcgttcagcagattataagcgatgccgaaaataaaaatgccgcccgcgatacgtaaggcatgaatgttaatgtcaaacagtttaaagatcagatggccgaagattaaaaaagccgccaagatgataaacgacagcacggaagccttgcgcgcgatcgctgtccgttctttctccgggtacccttccgtcagtgaaagaaaaatcggcacgtttccgatgggattggagactgcaaacagtgaaatgaagacatgaatgatgaatgaaaacatgcgtacctccttatgacttgccattattgagttatgttttgttctccgctgtttcttatgcatggtttttaccccgggggctgctttttataacctcagccggacaatctggaaacagaaaaaaccgtccttgtaaggacggttttttctgtttgctatctccataagccttttccgaatttcaacagccgataaagcattttcaatttttttagcatgcgttaatttcctttttcactctgaatcaatgcgccgagagacatgatatctatcagctccaataaaattctaccataaagggtactttttctctattatcaattcatagagaaggtgatttgtatatctttagaaaactccgttacatccgtcctattttcttttataatgtaaatattgaacaaaatccctatattacttgtaaaaggagttttagaatgtattgttctcaatgcggccatcatactgatggcggaaagttttgtgaaaagtgcggggcgccccagcccgggcagggaggcgcaggccaaacgcaaggccaggccgctcaggccggcgccgcggctaagcaggcttcaaagcaatttgccttattcgtgcttgatgtgttaaagcgaccgtatcaaacatgtaaaacgacaggcggcgaacagcttgtcagcagcatcatcaacatggtgcttttctgtctggtgacgccgattatgttttatattctcctatcagacggctttcgtgacatcagttttaccgcggttgtggtcaaaccggcgcttacctttgcattatgcgttttttgcctgtatctcttgatttttatcgctttgaaggccggcggcgcccaggtgtcatttaaagattcgctgtccagattcggggcctttttgattccgtttacagctattttgcttcttgcacttatttttatgctgcttcatacaaccgtttgcttcaccattctggctgtcggtcttttaggagcggcgtttgccgtgcctccgctcatgctggcgagctatcagcatcagctcactactaaggcggatatcatttattctgttatcgtcatctatttgatcatttgcgtaacatttcaattcacgatcaagcattatataaaagaactcatgaattatttcttcttttaaaaacggaaacccccgccgcctgattggcgcgggggtttttttattgaatggatgttaaataaattcttccgtctttaacaacgccgccatacgtccaattgtatgatctgagcttcggactcccgccggctttcgtaatataaaactcctcgtacgtatgaatcgtcagatgagagcctttctgtgaaaagcttttgacattcacttcattaaatacttcggtcgtcccctcgctgtgcagttttttgaccagtttctgctgatctgcatacaaagggcttccctcttctaaattgcccgccatgatggcaaaattgttaaggctgacggcgcttgattgatttgtcaggtaatcagtcataaacgatgtgacttgctcgtttgtcacgctgcctgaagctgtatttcctttggaagatgcccatgcggatgtataggttttcggctggtcgttttttattttttttacatttgtcccagaagaatctgaggctggatcagctttttcgaaaacccattttttatgttttgtatcatatgagagtacataatgaaagctcggctcagcctcttccatatcaggcttcgtattcccgtcgaaataagcagactcatgaagctctttacccgtaacagttacttgccagcggccgttctcttgagaaatcgcaaatgaatccagatcaaagcttgtctctttatactgatccttcaaaaaggtgccggaactcttcatgccggataccacttctttcgtctgctctttccaggcggaaccagcctcggtcatctgatcggtatttccgtctgccatcgcttttgtatactgcttcgttgttttgacaatcgtgtccatgattgtttgttgtgtatcttgatccgggataagcgttaattccatatcagtaccgttgatcggaacatcggcagttttcatttttccccaaggaaaatcagcctccacggcggctgtcatggaaccgtcagttaagagcggaccgtatgtaacggatgtaaacggatctttatggacggacttgccgtttatcagcagatcgcctttcgcgcttttgaagctgtctgccggagtgaatgtcacatcctcggcatctaacggcaggtcaaactcaacattccggctgccggccgcctctgcctcttgttttttgacaacgtcaaccgtctcatttttaagcttggcttccgccgtgtagacaccgggtgcatacgggccgaagatttgggtttcatcggcttttttgaccgtacctgttttctcgctgttgatataaagatcggcgcctttataattgctggtgacgcggaaataaaccggatcgactttcagttcgtaatggtcaaacaaaagaagggtttttccctctttttttacgtataccgcatctttttctgatgaattgccgcgaagcgctgccagcagttcatcgtgtttctttgcgtatgcaaggagcggtttgacattggtctcattcagcttcagttttttgtctgaaggagtgagcagggctgcgagctttttcgtgtccccgtcatgaaccgcctgttcgaattgatccgtgagccttttttcagatgtcagccaggctccgattttatatgcggcaatcaataagatcagcgctgcggcaatgccgccccacatgaagagcgtttttttagggatcggctttctcatttgtgaagcaggttcagccgcttttacagccgcctgccgctccagccggcttcctttcccgatcggttttccgcattctttacagaaatgcgcttcttcattgttctgctggccgcaatgcttacaaaaaaacatgactttcctcctattcaatctgcaaaacttgtataacttttcctatgtttcatattttataataaagtagaatgattttggagttattttcaaaaatagctgtcgatcataacggaggaggagaaacggacatgcaaaaactgagcatccgaaaagccgcggagccggatgaagcgctgtatgaactattgctgctggccgatccgtcgaaagagattgtcgatgattatcttgtaagaggagaatgctatacggcctggacgtcagacgagcttgcaggggtttacgttttattgcaaacaaggcctaaaacgatagaaatcgtaaacatcgcggtaaaagaatcgctgcagaacaggggattcggaaaacagctggtgcgggatgccattgaaaaagcgagacaatcgggggctgacacgattgaaatcggcaccggaaattccagtattcatcagctgtcactctatcaaaaatgcggattccgcattcaggctgtcgaccatgatttttttatcagacattatgatgaagacatttttgaaaacggcattcaatgccgggatatgatacggctttatttggatttatgataaaaagggcgccggctgacatcggcgccccttcgtttaccattcagacggattgatccgcttgtttctctgtatttctttgacttccttgtctgactgaaaaaacagcaaaaacgatcgtaagggtcagtccgaccgccgcaaaaatataatccgcattcatcaacagcagaagccctgtgtagacagcggccgacagcggttcacccattttgacaatggaaaaaatcagtgcaaagacccttccgaaatatgcggccggaaccgtcttttggaaatacagcaccgtttgcacatcaatatacgagatgatgatgccaagcaccaggaagatgatgcactcaaacccatgaaggggaaaaaacaggagcataatgagcagtcccgctgccgttaacgtccgcgggtacagccggttcaagcgttttgtattccatttgaaaaatacggccagattgcccaaaagcatccccgcctgaaacatagaatacatgacggcaaaccatacagaatagttctgctgaaaacgctccacagcaagaatcggccccattactgaaataaggccggcaatgacgagatttacgacgaaaaagtatccgaccgatgtcagccatgccgcatttcctttcagcattctgtaaccggcttttacatcttcagttccgttgcttttttcattgggctgttctgaaatacgaataaacgcgataaatgccgcagagatcaaaaaagcagttccgtttatggcaaacagcagcccgaacggaatagccgcaatcatgatcccgctgatcaattttccgacgatgagtccgatcaagtcactcgtattgatcagagatgtcgcctgatcaagatgctgtttgcggacgagcaacggaatgatcgcgactttcgccggcgcaaacagcatcgattgcagagatagacaaaaggcgcacaccccggctatccacacggttaataaatcgttcgcgctgagcaccgccaagaggatcatgatgacggcccggcccgtattgcacaaatacaagatcgacttttttcggaataaatcaatcagcggccccgccagcacgccaaatgtcaacggcacgagttcgataaaagaaataacgccgactagaattttgctgccggtcaattctaacactaacagcggcaaagcaatgagccagaccccatccgctgctgaagaaaacacctgtgcacaccaaagctttgcatagttcggtgttcgatatgtcatatcaggcccttttttgatcctcgtcatcagaaacaccgccgaaccattccagcgttctccatgattcccgtctttccgtataatcctcttccatcacctcaaatacaatgccggtatcttgattccgataaagctcctgcaaagtatcggcagcccgtctcagcagctcctcagcgatcgtcccttcactcggatggcggccctcaaaacagcggacgcccccatgcgggaacgcaagctggcgaaatgagctgaagtgataatgcttaatgctctcttttatcgacagaaactgaaagaaatcgggatatttcagctgatcatttctgaacataagcgcggaagataagtgagtctgataggtaatcgcccagtggcacagatcccacgtaataccgacatgcttcagatccagctgcaccagctctgtaaaatcctcaggataaatgaaaatcggatcaaaatcctctcccagattcccgatgatcggaaggttttccacaccgatccaaatgtctgtccctttcagccgctcatcaaactccgcgaaaaactcaacgatttttttacggtttccttccaggtcatagacttgaaattcctcaaccgtcataaattgattcgcatgaacggttatgcctttggcaccgtatttcacagcgagctccgcaaagtgataaagctgttttttgatgtgatcttcatgcacataatcggcatgatctgtcgggaaatgcagcgtcaataatgaaggatcaagctgtttcgcatattccagcgtctgattaaatgttttgagataatccgcttccgcaaaggaatggccgtcaaaaatattcgcttccagaccgtatcccgcttccacccatttctcatcgatttgcttcggatcaagtccgaaaaacggaatttgagcaatcataggacagtcaccatgttcctctcacaagcataaacgcttccgcagccgaaaaacccgcttttgctccccacacacgggcattatgttcgatcgcctgcaaagagcggggatgagggaagtctctgagctcggaaccgtaacacgccatcgatttcaatttcgtttcaagctcgtcttcaatattaacgaagaaattggcatgaaactgatccttctgacagtaattccattccgtcgaagacaatgtttcataggcaaaaacccgttttaccgtatgaccgggaagcggacgggttgccgtcatgaccgctctgaatacgacagagtggtcaatattaatgtcaccgccgtactgggtatacacaatgtcaggctgaaaacgattgatttgtttctccgcttccttcacgacatccagcaaatccattgaatccattctgttatcaggaaggttcagcctgacaaaatcatggatgcccaaagtgctgagcgcctgctccgtttcttgattagaatgctccataacggaatcttcaggctttttgtaatccgtttttcttgatgacttgccttccgccataatgactgccgacacgctgtcaccttggcggacatgtttggcgagcgtgccgccgacgccgataatttcatcgtcgggatgcgctgcaaataccattactttcatcatattgccctcctttaactaacatttcagctgtatccgctccgcagttcatcagcatatcgagcatggagaggtgagggatatgctccccgaataattgaggatagccaaaatgtcggatctgctgatactcaatgacaattccgtttctttcaaaatcgctttctattaaatagtcggaaccctgactgcctgaataataacggtccgcccccagctcctgacaaagcgctaaaacaaaatcgctttttttctccttccggcattcaagctcagagacataacagagcggcgtttcaattcggagctcttttcggaaaaattcaatgatgtgcatattcaaatcatggagatattcccactcccgctgatagacatcttgaaaaaaatgctggtatcgctcaaaatagggagctttcgcatagttcatcttaatcgccatccaatgttttttccgccaatcctgtgtctggtcgattttcatatgccgaagctctatgtctttatattgtttcatctgcaaaggcactgtcagccatctggggccttgcggcgttttgattctgttgcggttgagaaatccttttttctcaaattgagctgtgtcatgaatggcaaacagatccgacttatacattttttcaaaaaaaccgtaccacggcagataactggattgatggccgcttattgttttcattccggtttcgtaaaaagtcggcattgtttttcttcagctccccaatatcgtttcggtctcgcgatttctttactgtgtgaatagccaaaatcagcccattgaagcttgcggcaaatggcgaattgcagggcgtcacgcatcaataagtaagaggcctgcgctttttttcccgccaggctgtttacattctgccaataatagaaatgagagcggtcatagagaaaaatactgctgctgatcagcgtctcatcctgatatgctccgatccaaaacattcggtccgcaaacgtgtcaagcagcttttggaaaaagccctggctcagcacataagccgcgccgattgacgctgtatgctctttgtagaggtcataaaacgcgctaagttcttttcgcccgatcagccgggtgacaatattctctttttcagcgtatctgactgccgtccgggcttttccggaaatacccgtccaaagctcgtcaaacgtgtccggaagcgaaagaatccgtgtcgccttttccgtccatccttccctgatttcttctgtaaaagaagtctgaccgtacggcagcagcatccgggatatgttccggccgaatatggcctggatttcactttgaagccattcaaatgagatggggcgatctgaaataacgccgccgtatccgatcatattgccggataatacgcccttctgttcaaaaagcggaagatagatgacttgtcctccgtccgttgtcagtctgacagggtgaaatgacgtgccgggaagctcttccatgaggattccccaatcatagctttgaaacaatcccgcctgatacatgtcagcggcccgatcccatgcctggcgggtcgtgcatactgctgttttttgcatagttatcaccactattcagtcttattctgttgctcacaatatgataaaacggattcggctatatatctgacttgctccttttgaagaggaggtttaaacggcagggaaagaactctcttccaaagcgggtcttccccgccttcccccgcgtatgtttcataaatcggaatacgtccgaggggaagatagttccagcatgtttggatgcctctttcggctaaataaacggaacacccgtaccgctcttcatcccggggaaatacaaccgttaaataattcagatgttctccttcttggggctggatcattcttatgccgtttgtttctcccgcctttgcaaagatttctcccgccgtctgtaagtttcggagcgaagctgttacaagctgatccatacgtgaaagctgatcatcaataatggcttcccttgccggatgcatgcgaagcacgggtacaacagccggtttatccggcagagtttcgagctttgtggctttcatggaaggcatggcgcccgcttttctaaacatatatgaaataggatgatgccgtttccgtttcattacagcttggattctttgatttctgatatagattcgatagtcagctgccacttggctgcgctgttccatcgggagatttgctttttgccgaagccattctttcggcgcgattaacgcgccgcctccgatactcgcaagcggctttgaggggccgaagcttaaaatgccgaaatcgcccaaaccgccggcaaatgtatccgcttgttttgtaaacatggcttgagcggcatcatcaatgacagcaattccgttttccttcgcccagtcaatgatagcggtattttctctccggccgtatacatgcgtgaggataaccgcacacgtctgccttgtcactttttttttgacatcctcaaaagataaggatagatgctcatccagctgcgcaaacacaggcgtcgcaccggattgcagtacggcatcaatgacattcgggcagctgaaggatgagaaaatcacttctttccccggcccggcccccgaataagttaatgcgagcaccagtgccgcactgccgctggatgtcagcacaaccccttttccgtaacgtttttccagtttttcagtcagtccgctttgtccggcagtaagcaagtgtttcactgcgcgcagacggccgctgacggaaaactgtccgggataaacgggatatttgaccacttccgggtttttaggaaagtgaaagtttgtgcttttgtctttcatcttttatgatctccaggccttcattcagacttactttcggagcgtaaccgagcaaacgtttcgccttctcgattgacggcgcccgtttaaaaatctcgatgtcttttcccctcacgccgtcttcgcccagctttttaaacagatagttatccttctctctgcctgagagcacattgactttttcagccagttcttttatcgtgatcggctggtcgttcccgatattgaagtcttcaaagacggctccttcatgaatgagagcgagataagttccggtgacgatatcactgatgtagctgaagcagcgtatttgtccgccgtccccgtaaagaggcagctcagagccattctcggccaggctgaaaaacttgttgatgacaaaatcctcgcgctgtttcggcccgtatacattaaaataccggacgacccgaatatgaagttcgtcggaagcctgttctctcaaatattcctctgattgcagtttggcttttccgtaagccgatttcggaagctttctgcttgtctcggtataaggaaaatccggtgaatctccgaacacttctgaactcgatgagaaaagaagtgtgctgattcccaattcaccgcatacctcggtgacgtttttcgttccttcaaaattgacccgtatgacgtcttcttcattgcttcggcagctgtctactccgaccattgccgccaaatggacaaccgcatccgctccccgcagtgattcgcggagggacgaccggtcaagaatatccgtttggcggtattcagtgtcaaaagccggctccttttgatctgcaatgatggtgtgataacctttatcctgtaataatgccgccagttcgcttccgataaaaccggctcctccgataatcgcaatatgtttcatgatcctacctcctggctgatagtcaaaacttcttttatagacttgacaatatagctgcaatcctcatctgataactggctgtaaagaggcagtgacacgatctcccggaaaacacgttcagttaccggaagctcggcaggaaaatgttttttatagtaaggatgcaaatgcacgggaataaagtgcacgctcagcccgatttgtttttctttcattttctcaataaacagatctctgtccataccgccgttttctcgaatgcgcaaaataaataaatgccatgagtgcgttatgccgcttggaatgtcagaaagcggaagcgccgctttgtcagattgacctgacagttcacgtacataaaattgagcgatctgttcccgtttttcttgaatgtcgtttgagcgcttcaattgaaccagaccgagcgcggcctgaatatccgtcatattatatttaaagcccggcagtaaaacgtcgtatctccagctgcctttttcaccgtaccggttccaggcattttttgtgatgccgtgccatccgtacagcctcgctctttctgcggcctgttcgtctttcatgacgagggctccgccttcccccgttgtaatatttttggtggcataaaagctgaagcacacggcatcgccgtgagtgccgatcatgcttccattatattttgtaccgagcgcatgagcggcgtcttcaatcagatacaatccgttttctttacaaatggattgcaagttttccagatcagccggatagccggcaaaatgaaccgcaattaccgcttttgtgcgcggcgttattttcttcctgacatcttcgggatcggcacatagacttttctcgcatatatccgcaaacaccggaacggctccggcgtgcagaatgacattgacactggaacagaacgtgaagctcggcacgatgacttcatcgccttctcccacaccgagcgccaataaagccatatgtaatgcagcggtgcctgaattacagctgatgacgtgttcggctcctatacattctcccagctttttttcaaaatcgattaccttcgggcctttcgaaatccagcccgattgaatcgtttcggttacgcttgcgatttcttcgtttgtcatatcaggtctgtgaaaagagataaatcgattactaatgacggttccctcctataaagtgacaactctgcaattgtcggctgatttttccttgcatacatttcttgtgtcaaagataatcggtgaggcatccttcaaaatactgtagtcgatgacatcgtgatctgtatgaatgatgatgacgtcgtactgattgatttgttcttttgtgaaagggacagattgtttgcggcttccgtcattcaagcggatcccgctgataaacggatcatgataatcaatcgcgcatcccttgtccatcaattcttccattatcgtaaacactgaggattcacgcgggtcatttgtattttttttataagcggcccctattattaagatgctgcatttgtctttgcccgccagtttcaaagcatagtcagagacagaaatcggcatgttggaattgatttcgtccgcgagatcaattaattttgtctgcagccctttttcattcgcgatccatttgaagtaaaaagggtcaatcgggatacaatggcctccgactccggggcctgggataaatttttgaaagccgaacggcttcgtgtccgccgcgcagatgacttcccatatatcaatatcaagttcacggcaattaagcgccatttcattgataagagctatattgacataacgataagtattctctaggagtttagctgtttcagctacttcgggtgaggtgaccgggtgaatgcttgtaacaatggtactgtaaaacgctgaggcaagttctgtgcaagtctgtgtggtaccgccgactactttaggaatatctgaaacttcatattgcctgttgcccggatcgattctttccggagaataagccgtaaaaaagtctgttcctattttcatgccgcggcttgatgccattctgtcggcaatcttttttttcgttgttccgggataggtggtgctttctaaaattaaaagctgatgctgccttccataagcaatcatgctgtcaactgcactgtcgatgtaggttaaatcggggatcttgtcttttttgttcaggggtgtcggcacacatatcacaatgatgtcgcatttttggatgagcgacatgtcggcgctgatttgaaagcgttttgtttgtaaagccgagttcagtctgtcgtcctctatatcttgaatatggctgcttccggcggctaacaaggaaaccttttcactgtttttgtcgaatccgataacattgtatcctttatcgacacattccagcgcaagagggaatcccacatatcccatgcctaacacgcctacaatcgcctgcttcgtttcaatcagatgtaacagccgtttttgaccaaggttgctggcttcttttgtgacagtattcatttttcgccccctaatagatagaaaagagtattgttttttacaatttaaaacaaatatcgatcgatatcgcaattataacaaaagttaaaatttgataaatgagttttacatccttttataaattaggtattatctatttatttttcttttatttgtaaaataaaatcctgtcaaatggtatatatctggtaacgagtgagaaaatctcccttaattgagagaatatacagaaaacaatataaaaaaaacaggccgaagcctgtttttttattctttcactgcctcagttacagccgcggaaacgagtgatcccgctttctctaatcgttctttgctgatgtgtttcatattatcattttcggtgtgataccagggccccggctcctgtgtatcggggctgagccaaatccagttagccgacggaatccccgcttcataaaaagagacatggtctgagtaaccgagctgaatcagatttggcttgaccaaccgggatttttcagcggctttttcagcataccggacgctcgggttttccttgccgtcaggagtcgtgacacacatttgactcgcttcttcccagtcagtcgcaatcatatcggcattaaaattggcttggctgtgctttctttcattgttcgtgagtgtactgacgtaataagatgaacccgcagaccataattcttctgcaccgaacaggataaagcggatctctttgtctttcggtatgtgtttgagttgcttgctgatttccagaacggcagatgtgcctgaggcgttatcatccgctccgggtgcgccttttacgctgtcataatgcgctgtgacataaataatatcagcatcagaagagttggcctgtgccgctttgcgcgttcctataatattttgtgaggtgcggtttttatagtttttaaattgaatgactgcctgcttttcctgcagcaatgcttcaccgtcttcttttttcatacccgccgccggtatcgtgattcctttatcggtatgcggacggacggcgagcggttttgttgtctgattataaataatgactgctttggctcccgcttgttcggcatgtttgatcttttgagaaacggggatctttccttcgcgtatcactgcaatctttcctttggctcctgttacgtcatcgcgtgatccgcagccgccgtcaaaaatccctccctcaattctcagctctttttcaacagcggattgatcagcggagcggagcggaaattcatgatctcccgctgtgactgaacctgaaaagtattttttcaacggaaatgtctgtactttgacactggcgccctgagcccgcaggcgattcgatatgtattcagccgcttccttttctttcgcagttccggtttcccgcggaccaatggtttcgctcagatcatgcatcgtgtccaatgcatcatcagcatcaaaaaccggcgcggtcacggctgaataagcatgagtttcggacagcggcccggcagacgcgccccatatgacgcttgctgccaccgcggctgacataaatgaaaatttcatcataatccctcctcttattaacacctcttccctttcgattgaagaacactgattcctttaaaaaggggaaaaatgaatattattgaccaaatgaagatgatgaaaaaggagggaaaagcccgggagcataaaaaaacgccgggagaatatctcccggcgtccattccattacttattcaagttatagaaagagttgataccgtggtattgagcagtttcagccaactgatcttcgatgcgaagaagctggttgtatttcgcaacacggtccgtacgggacggagcacctgttttgatttgtcctgcattagttgccacagcgatgtcagcgattgtgctgtcttcagtttcacctgaacggtgagagataacggcagtgtagcccgcgcgtttcgccatttcgatcgcatcgaatgtttcagtcaatgtaccgatttggtttactttgatcaggatagagttgcctacgccgtttttgataccttcagcaagctttttcgtgtttgtaacgaaaaggtcgtcaccgacaagctgaacttttttgccaagacgctctgtaagaagtttgtggccttcccagtcgttctcgtcaagtccgtcttcgatagagatgattgggtatttagaaaccatttcttcgtaccagtcaaccatttcagcagatgttttcacaacgccttcgccagacagatggtatttgccgtcttctttgttgtagaactcagaagatgcagcatccatagcaagtttcacttcttcgccaggtttgaagccggctttttcgattgcttcaacgattgtttgaagcgcttcttcgttagaaccaaggttcggagcgaatccgccttcgtcacctacagctgtgttcattcctttagcagaaagaacggatttcaggctgtggaagatttgagcgcccatgcgaagcgcttcacggaagttaggcgcgcctacaggcataatcatgaattcttgaatgtctacgttgttgtcagcatgttctccgccgtttacgatgttcatcatcggtacaggaagcgtttttgagttaaatcctccaaggtattggtaaagaggaatctgtaagaaatcagcagctgcgcgcgcacaagccatagatacgccaaggattgcgttcgcaccgagtttgcctttgttttcagttccgtcaagctcgattaaaagctgatcgattgcgttttgttcagttacgtcaaagccgagaagctctggagaaatgatttcgtttacgttgttaacagcagttaacacgccttttccaaggtaacggtctttgtcgccgtcacgaagctcaaccgcttcgtattcacctgtagaagctccgcttggcactaatgcgcggccgaaagctcctgtttctgtatatacttcaacttcaactgttgggttgccgcgggagtcaaggacttcgcgtgcataaacatcaacaatgtatggcatgagtttgtctctccttttgatttacgcttatttttgaattaaagatgttccggtcatttctttcggtttttcaacaccgagaaggtctaataacgttggtgcgaggtcgcctaggattccgccttcgcgcagcgtcacgccttctttcgtcacaatgacagggactgggtttgtcgtatgggcagtgtgcggttcgcctgtttctgtaatcagaatgtccgcattaccgtgatcagcggtaatgatggcatgtccgcctttagcgatgatggcgtcaaccacttcgcctaagcattcgtccactgcttcaattgctttaatcgtcggttcgaccattccggagtggccgaccatgtcagggtttgcaaagttcaggatgatcgcgtcgtgcttgtcagccgcgatttcttttacaagagcatccttcacttcatacgcgctcatttcaggcttcaggtcatatgtcgcgaccttcggcgagttaatgaggatgcgctcttcgcccgggaattcttcttcgcggccgccgctcataaagaacgtaacgtgcggatacttttcagtttctgcaatgcgaagctgttttaacccgtgctgtgctaatacttcaccgaccgtattgtcaaggtttaccggtttaaaagccacatatccgtcaacagattcactgaagtgagtcaggcagacgaaatacaggtttttcggatgattttcaccgcggtcgaaatcgcggaaatctttgttggtaaacgtgtttgaaatctggatggcgcggtctggtctgaaattatagaaaatcacagaatcgccgtcatgaattttcgcaacgggttcaccgttttcttttgtgatgacggacggaatgacgaattcatcatgaatgccgttcgcataagaatcgtcgactacatccatcgcgctgcggtaagacgggccttcgccgtaagccattgcgcggtacgctttttccacacggtcccagcgtttgtcgcggtccatggagtagtagcgtccggaaatgctggcgatttcgccgacaccgatttcttcgatctgctcattcagctgctgaatgtaagttttcgctgtttgcggacctacatcacggccgtcgaggaaaccgtgaatatacaccttcgtcagtccttcacttttcgcaagcttcagcagcgcgaataaatgattgatatgactgtgtacgcctccgtcagaaagaaggccgaacaggtgcagcgctttgtcgttgtctttcgcgtttttgatggcgtcaaggaacgtttgattgcgttcgaattcgccttcgcggatggcaacgttcacacgtgttaagctttggtacacaatacgtcctgcgccgatattcaaatgaccgacttcagagttccccatctgtccttcaggcagtccgactgcttcgcctgatgccgtcagcgtctgatgagggtattggttccaataacggtcgaaattcggttttttcgcttgtgcgactgcgtttccgactgtttcattgcgtaatccgaacccatcaagaatgatgagtgcagctggttttttactcatattgaccttcctccaataattgaacgaatgactgcggttcaaggcttgcgccgccgaccaaagcaccgtcaatatcggactctgccatatattctttaatatttgcaggttttacgctgccgccgtattgaatgcggagcttgtcagcagtttcctggctgaagctttcagcaacgactttacggatatgcgcgcagacgtcgttagcatctttcgctgtagaagatttgcctgttccgattgcccagattggctcgtacgcaataacggaagcggcaacttgctcttcagaaagacccgcaagaccttttttcacttgatcggcaacaagatcatttgtttttccggcttcgcgctcttcaagcgtttcacctacgcaaatgatcggcacaatgccgtgtttgaaagcggcatgcgcttttttgttaactgtttcatcagtttcagcgaacatttcacggcgctcagagtggccgatgacgcagtaatccacgccaaggtctttcagagcgaccgggcttatttcacctgtgaacgcaccgttttcttcaaaatgcatgttttgggcgccgactttcaggtcagttcctttaacagcagaagtcagcttttctaagaaaagagctggtgcgcaaacaacggcttccgctttgtctgctgctggaatggaagatttcacttcttcaacgaagctgacagcctcgccgagtgttttgttcattttccagttaccggctataattggttttctcatctgttccacttccttatagcagtttttatttatcgttcagcgcagctacacctggaagctctttgccttccatgaattcaagggatgcgccgccgcctgttgagatatggctcattttgtcagcaaggccgaatttttcaacggctgccgcagagtctcctccgccgatgacagagtatgtatcgtttgcctctgccaatgcttcagccactgcttttgtgccttgagcgaacaagtcgatttcgaatacgcccatcggtccgttccatacgacaagtttgctgtttttgataacttcagcgtacgtttcgcgggttttcgttccgatgtcgatcgcttctaaatcacttgggatctcagagatcggcacgatttggacgtttgcatcgttagagaaatcatcagcaacgagaacgtcttccggcatatagaatttaacgcctttttctttcgcgcggtccatgaatgattttgcaagttcgattttatcttcttcaagaagagatttaccgacttcataaccaagcgcttttacgaatgtgtaagcaagacctccgccgatgatcaggttgtccactttatcaagcagactttcaattacgccgattttgtcttttactttcgcgccgccgatgattgccgtaaacgggcgctcaggatttgtcacggctttgccgagaacgtcaagctctttttccatcaggaatcctgcaaccgccggcagatgctcggcaattccggctgtagatgcgtgagcacggtgggcagcaccgaatgcgtcattgacatatacatccgcaagttcagcaaatgctttagcaagctcaggattgtttttctcttcaccagggtagaaacgtacgttttccaatacaagaacgtctccgtccttcatatcagaaatttgtgcttttacagcatcgccgtaggcttcatccgcttttttcacttctttgccgaacagttcgcctaagcgtgcagcgacaggagttaaacgaagctcctcaaccacttcgcctttcgggcggcctaagtggctcgcaagaaggactttcgcgccctggtctgcaaggtgtttgattgttggaagcgcagcgcggatacgagtatcgtctgttacttccccgtctttcattggaacgttaaagtcaacgcggcagaatacgactttgccttttacgtcgatgtcttttactgtttttttattcatgccttaggagatcctccttcaaaatggtttgcatagcacgaaaaacgtgaaacgtgaaaccgcctcatgatgcttccgccgcggggcagattgcagcttccgggcacggggcagatcgtcttctgagccagggcaggcggctcagaaaacgaaagtgccgcggaaacttcaaaacgcggacgttctgcagcaatccggcgctttctgaaagccggttctcatggaaaaagggaaagggagtccgtccccttcccttgtccgctttcattatagcgtttctgtccgaaagaaccaagtccggccctttccgggagctatgaattaaagaccttgttttgcgatgtaagctgcaaggtcaacaacgcggttagagtagccgctttcgttatcgtaccaagagattacttttaccatgctgccttccataaccattgtagaaagagcatcgattgtagaagagttagcattgccgttgtagtctccggatactaatggctcttcgctgtagccaaggattcctttaagatcgccttcagccgcttctttaagagctgcgtttacgtcttcagccgttacgtctttgttcagttcagcaactaggtcaacaagagaaacgtttggagtcggcacacgcatagctccgccgttcagtttgcctttcagttcaggaagaacaagggaaactgctttagcagcaccagttgatgtaggaatgatgttttcagctgctgcacgcgcacgacggtagtctttgtgcggaagatcaagaatttgctgatcgtttgtgtaagagtgaacagttgtcatcataccgcgtttgatgccgaatttgtcgttaagtacttttgcaaacggcgcaaggcagtttgttgtgcaagatgcgttagagataacatggtggttagccgcatcgtatttgtcttcgttaacacccataacgattgtgatatcttcttcgttagcaggtgcagagatgataacttttttcgcgcctgcttctaagtgtttcgcagcgtctgcgcgttttgtgaagaaaccagtagattcaactacgatttcaacgccttgtttgccccagctgagtttcgcaggatcgcgctcagcagaaacttcgattgttttgccgttaacaacaaggttgctgccgtcaactttaacttctgcatctaattttccgtgtacggaatcatattgtaaaagatgagcaagcatgttagcgtctgttaaatcgttaaccgctactacctcaacttcaggattgtttaatgctgcgcggaatacgttacgtccaatacgaccaaaaccgttaataccgacttttactgccatgattatttcctcctttaaataagtgagagatatttatattgagggactgttatcccttaataacttctttgcggctccttcgtccgtgacgagaaccgtgtttcgctgctttttaaaataagcttcgattgcttctgcttttgatgatccgcccgctactgcgataatgtcgggaatggcatcgaggtcatcaagctgcattccgactgaatgcaccttgtgaacgacttctccgtccgcattaaagtagtagccgaatgcctctgtcaccgcatgattgtcatctattttcttcaaatcttccaaaggcgtgtttcttcgctccgccattgttctagcttcgccgattccgtgaacgagcatactcgctgatttaatcgtgtgaagcacctcttttacggaaggctcttcaataatagatgagtaggcgccttgtgacagctgtccgggaacgaacaaaagccggtaagtgcctgaagccttttccgccatatgcgcgcatatggtgttcgcctggtttttcacatcttcgcctaaaccgcctcttgcgggcacaaacaggagctcgcggttttttgaatccggcgtcatcatatcggcgacggcttcaattgtcgtaccgccggttacagcgacgatatttttgcctgaaaatctctttttcatacatgcaacggccgctctccctaattcttttttgacccaaggagattggtcgctgtctccggaaacgataatggcgtctttcagattaagccgctcttttaatgtcttttccaaaagcgtcaaccctaaaacatccttcatcgtatcttccagaatcgaaagcagtgaatagccctcttccgtcattgtcatgccgtttgttttaatatcgatgagattctgttctttcaaaaactgaacctcgcttctgagaacgcgctcggtcaatccgaggctggctgcaagacttctgcggccgatcggttcggtaagcctgatatactgcaagatttcaaatcttttctgcatcacaagcaaaagatcaggcaataattttttttgagcttgtattaactggttcatgactcaaacgttccttcctattcatactggacagaaaatgtcccgctatgacaaaaaacgtcccatcatagccaaaaaaaattatgtctgctttctttaattattttaacaggatgactttgttaattcaactgttaaaggtcaattcctcgacattcttcgcaggattttccagtatctccttgatacagtcattatatacagaaacggaatgaaggtgacagacaaaagcccgccggagcggacttttgtcgtaaaacgctttcattttatccaaagtttttctatttcttctaatgatttatttttcgtctcaggacagatcgtcacgacaaacaagaaacagagaatattaatgacggcgaatatccagaaggtgtacgcgagccctaacccgctgatcatcatcggcacgaactggccgatcgcccagttggccccccataagaatatcgtcgcaataccggcggcgcgtgcgcggaggtgattcggaaagatctccgaaatcatgatccacgtaatcggcccgaccgatacgcagaaagcggcgacgaatcccaatatgatgacgactaaagccggaccgctcgccagctgaaaataaaaggatgctccgattaagatcatgaacagcgccataaaggcagatccgacccccatcagctttttccggcccaccttatcgactaaaagaaccgcgataatggtgaaaatcacttcaacgacaccgacgatgcatgtcgtgataaaccccgcattctgtccgaagcccatcattttgaaaatttccggcccgtaatacgtaattgcgttcataccgataacctgattgaataaagccagcagaatcccgatcacaagcgcttttctcagccccggcttaaacagctgagacaatgaccccattttttctaattgtaaagacgtttcgatttgtttgatttcttctttcgcggtctgctcgccgttaatgcgcgtcagcacggcgagggcttcattccggcgccccgctttcgcaagccagcgcggactttccggcacgataagcagcacgataaaaaagatgacggacggaatcatgccgtaagcgagcatccaccgccagccggtgtgcactccccattcatacgagccggactgctggacggcgaggttaataaaataagtgccggatatccctaatatcgtaaacagctgatacagtgaagacagactgccgcgtatggccggcggagcggcttcggtaatatacgtgacagaaagcgaggagcccatgccgattcccagaccgccgatgactctggcgatcactaaggaagacacactttgagaaagcgcagagacaaccgctgacaccgcaaacaacagcgccgctgccatcaaaatctttctccgtccgaaacggtcactcaaaaatccggaaatcccgacgccgaaaacaccgccgatcataatgctcgaaatcacgagcccttccataaaaggacttaagcggtacaaatctttcaggaaaccgatggcgccggaaatcaccgccgtgtcataaccgtacaaaagccctcccagtccggccgcgcatgagatgagaatgacaaaccacttggaatgctgccgagtgacaggtacatttgagccaattggtgccgggtgattcttcatgaattttaccctcccgcgaataatagaataaaaacgcttacaaatctgagtgcggcgcttgatgttgctttgttttcttcagaaccgccacatttgtacgtacttataaagaattttatctaaaaataaggaaaattagtacgtacaaataaagaataagcagtttttcataatctgtcaattatttttacagcttgatgaaagggcttactatgttatactgaaatttgtccgtatacattttggaggaattgatatgctaccgaaatatgctcaagtaaaagaagaaatttgttcatggctgaatcaaggaaaaatacagccggacgaaaagctgcctacggaaaatgagctgatgcagcagttcggcgtcagccgccataccatcagaaaggcgatcggagatttggtctcgcaggggctgctgtacagcgttcagggcggaggcaccttcgtcgcttcacgcacggcgaaatcagccatgcattcaaacaaaacgatcggcgtcattacaacgtacatatcagactatattttcccgagcatcatcaggggaatcgaatcttatttaagcgaacagggctattccatgctgctgacgagcaccaacaacaatacagaaagtgaacggcgcggtcttgaaaacctgctgtccaaaaatatagacgggctgattgtcgagcctacgaaaagcgcgctgcagacgcccaacatcggctactatctcaatctggagaaaaacggcattccgtttgccatgattaacgcctcttatgcggagctggccgcaccaagcttttccgtcaatgatgtcaaaggcggcatgatggcttgcgaatacgtcatgtccctcggccacacgcacattatgggaatctttaaagcggatgacacgcagggcgtcaaacggatgaacggctatctccaggcgcaccgggagcgcgggattttcccgtctccggacatgatcgtcacttacacgactgaagaaaaagaaaccgtgcttctccaaaaaattaagcatacccttgagcaaaacagcgggtcacacccgacggccattctttgctacaatgacgaaattgcgctgaagacgattaatcttctcagggaattcgggttaaaggtgcctgatgacgtatcggtcatgggctatgacgattcacatttcgcccagatttccgaggtgaagctcacctctgtcaagcatccgaaatccattatggggaaagcggcggcaaaatacgtcatcgactgcttagagcataaaaaaccgaagaaggatgacgtcgtgtatgaaccggaactcgttatccggaattcagtcaggcggatcggcgaataaaaatgggcagatacaatagtatctgcccatcagtcattaaattgaaaactaagctgaaaatcatgaggtggaagaacatcatctatattttctttattaaaatgctttaaaatataataaaataacgaatctgaaatatatagtcttttatcatagtatgtaaagacctttggaaagatatcctttttggattgcaattcatcgaagtgattaagcacagaggtcagcgcaccatgatttattgactttttctcatggattcggtgaatattctcatataaatactgaaaagaaaatcctctcctcgctatatctggatcagacgttaacacaattttcattatataatagtataacttcagcttcgcttttctttctccatctgcaatgtcttgaatttttgtcagatattcctcgcttactcttttataatacagagcattacattccttagctaattcaacactgtcaagaacaatgtaattctgacttctctttcttatcccactttcacgacaatagtcaaaaagaagttgttgatatacagcaactatttggctagatgcctctataaaataatttgttacattttcactaatgtctatgttcagctctttacagcctctactctttatattcattaaatctgtagtagaccatttagtagcatcaatataatcaattctttgagataattctccattaaatttttcaaaatagccatttataattttcgtcccaattataatgaatcttaagccgctttgataaaacattttcaggtcaaaagccaacagatattgatcgactaaatttaaataatgaaagtcatccagtacgataaactgaatacctttttccttcagtgattcagccactctgacacttacggtcttgggaagatccatttttcctgattcacttaataactctttttcagatgaatctccggtcactttcgcttttaaaaattgaaatagatttgcctctacttgactatcaatttttgagcacttttcaatacttttggagaagttatcagatatctccacaccagatttgtataaaatttgtgtataaatatcagctaaatcaactcccttcgtacagtctatcactatagtgttttcagctttggttacatatttttttcttaataatgtttttcctacttttgtttcaccatatattacgatgtgatgatccgtaagttcaattttatcttggtaatcctcatcaatttgttgtctatcaacataactttttaaaacattccgcgatataccaaaaacatctttcaaagaaacatccaaatttttattccctccctatatttcaagaaaatttttctattaaataatatcataatagtatgaaatttcgtattattgcacaaaaacaggcagcacactatatattatgtgctgcctgtttttcatctttttaattcggcgatgatctcaaatgatctcattctgtcggcatgctcaaagctttctgaattcaccatgatttcatccgcctgtgttgtccggatgaagctttccagcttttccttcacacgctccggtccgccgacgatcgttgaactgagctgttcattgaccatcgctttttcatacggcgaccagatttgatccatgtcttcaacaggaggcttcagctggttcggcgtgccgcggacgaggtctaaaaatctttgataatgcgatgttgccagatgctccgccttttcgtccgtatcggcggcaatgacggtgacgccgaccatcgcgtacggttgatccagtacgtctgacggacggaaggagctgcggtacagctcaagggcgggcacggtgtttttcggtgagaagtgagccgcaaaggcgaacggaagcccgagctctcccgcaagacgcgcgctgaagccgcttgagcccaaaagccagatcggcacgtccagcccttcgcccggaatggcgcggacttgattgcgcacattgccggacggtttgaagtaatttctcaattcttcaagctgctccggaaaatcttccccgctgtttatgtttcttcgtaaggctctcgccgttaattggtcggtccccggcgcgcgtccgagccccaggtcaatccgacccggatacaacgtttcaagggttccgaattgctccgcgatcacaagtgaagaatgattcggcagcataatacccccagaaccgacgcggatttttttcgtgcctccggcgatgtggccgatcagcaccgccgttgccgagctggcaactccttctatattatgatgctccgcaagccaatagcggttatagccccactcctcggcgcggcgcgctaaatccatgctgttgcggaacgattcagcaaccgttcccccctgtacgaccggcgataaattcaatacggaaaacgcagtatctttcaatgtatgttcagccatcgttttctcctttatggtttagtgtaagcagatcttaaacaaggtctctaccacacaccttaccacagcttttcccgtgagttaaacaatttgattcgatgatcttcgaacaatcagtcagcggcggttttcttacggatgaacagctcctcggcgacatcaataaaaagcttggcggcaagtgatgcgtctttcatggaaggaaccgccagctgtacctccctgaatacatccggcgtaaactctttaatcaccacttcttccgggaggggattgccggccatggacatatcggataagattgccatgcccaacccctcccgcaccatattgatggacgtgctgacattaaacacggtaaaggcggcgcaaagttcggcaccggcttgtttaaacaggcctgcaaaaggtgacgtgtaaccgccttcgcaaaccaccatcggttcaccgtccagatcttttatcgttacggtggagcgtgaggcgagaggatgatctttatgcataaccgctgccattttgtcttttttcagcagaaagtaatccatatcctctgtcgggaacagcagaatgcccgcgtcaatcatccgggattgcagccattcttttacttcgtccgccgttccttcatgcagtaccagctcaagcttcggataccgatttttaaacacgctgatcagctttggaatgaaataagcggaagcggccggaaatgtgccgatgtgaatcgttccctgttcaagccctctttccgcggccgccagctgctcggctttttctatccctttgagcacctctctgatatgaacgagaatttttccgcccgtgtccgtgagccttacgccgttgcggcgctcgcggatgatcagcttgatgccgagctctgactcaagcgcagagatggcatggctgacagcgggctgcgtcatattcagcgcctgccccgcttttgtaaagcttcccgtttcagcgatttgaacaaaaacccgcagttgtgtaatcgtcataacgttttacttatgctccttataaaaaagattcattttatttatcttactgattaccgtatcatatgatggaattgttctacaaggagtgaacgacgtgaaacagctttcgaaaatacagacggctcttatgctggcgtttctagtcacggtgtggggaattaactggccgctgacaaaggccgcgcttgcctattcgccgcctcttctgtttgccggaatccgcacgctgatcggcggacttctattattaatggtggcgctgccccgttttaaaaagctgcgttttaaagaaacgtggccgatctatcttatttctgccattttaaatattactttattttacggcctgcaaacggtcggcttgaattacctgcctgccggcttattttcagccatcgtgtttttccagccggttttaatgggcgttttttcttggctgtggctcggggaatcgatgtatcctttaaaaatagccggtcttattctgggctttgccggtgtcgccgtcatcagcgcagccggtttcggaggccatatttccatcgccggcattcttttggccttaggctccgcggtcagctgggcgctcggcacggtatatgtgaaaagaacgggcggacgcgcggactctatttggatggtcgctcttcagcttctgatcggcggcgtgctgcttgtcagctccggccatttttcagaaagcttttcagcgattcaatggaaagctccgttcattctcagccttctgttcatttcggtatttgtcatcgcgctcggctggctcgccttttttacgcttgtcggttcaggggaagcaagcaaggttgcctcttacaccttcctgatcccgctcatatctattgtcgtcagctcgatatttctgcatgagccgctgaccgtcagccttttagccggactgcttctgatcgtcacaagcatttgttttgtgaatataacaccgaagaaactgaaaacacctgctctggccgcagaaaaaaaggccgttcattaaaaaaactcttgccgcggggcaagagtttttttatttattgacgtctccctttcacgagatacgcagccgtaatgaggagatagatggccgcagtgatgcatgtgatgacgatggacgtcgtcgcaattactccgattaggatggccaaaagcgcaagcaccgcgaaccatgtcgtatacgggaaccatttgacgtaataagccggctgttctgttgaatgttttcttgatttcaaatgggcgaatccgataatcagccagatgaacagcacggtatagccgagggaacccatcaaataattaaatgtctggcttcctgcgaataaagaaatcaggacgcctacatataaaaatgacgtacaagtcagaatcgcataaacgggaacctttttcttcgatagttttgaaaagattttcggcagccggccgtcagaagcctgcgtaaacaagacgcgggatgacccgtacagtcccgagttcatagacgagataatcgcaagaagaatgacggcattcataatatggtcggcacccggaattccgatcatcttaaatactatgacaaacgggctttcgggaacgctgttgacttgattccaaggaatcaggctgacgatgatgaaaaacggcagcaagtaaaaagcgacaatccgcgttaacgtgcttcggacagctttcgggatcaccttttcggggttttttgtctccgccagcgtgacgccgatgatttccgttccgccgtatgagtagatcacgacgagcatcgccgtaatgacaccccccgctccatgcgggaaaaaccctccgtgatccgttaaatgagacagccccggcgccgtgtgattgccgaatgagaaaaataatagcagaatcccgcataaaataaagatgacaatcactgtaattttaatgagcgcgagccagtactccgtctcggcaaacagtttcacagaaagcatgtttacgaccgtcaccacaatggaaatgatcaaagccaatatccatatcggacattccggcagccaatattgaatgaaaatggcggctacgaccgcctcagcggcaatattgagcacccacattttccaatagatccagtctaaaaagtatgcagcgtacgacccgagagactgctgaaccaaatcacggaacgtccttgcatgtttgtttctgacagccatttcggccagcccctgcataataaacagcagaatgattccgccgaggaggtaggccagcagcacggacggccccgcttcatcaatcgccgtgctgctgcctttaaagagcccggccccgattgcgcctccaagcgccatcatcataatgtgtctggacgacatcgtccgttttaacgtttgcttgtccttttccatctatcacacgccctctcgcaaaaagtgttcatcacataaaaaagcacgccgcctctttttagaaaagagacggcgtgcctcaggcagccgcggtaccactcttgttgatcccgaatatccggaatccagcttaaaaaccttttaacgaaggtcagccgttaggacatagggaatattccgataattccgttccgccctgccacttccgggcgagttcaaagaacaatcagtccgcgttgcaccaacccgcggctctctttttctgattggattcttttactgctcccgttcacagtgttttatgttaaatgaatctcttgagtttttattttctgaatatagtaacataatatacagtcttctattttcaaagtcaatactaatttttgccgctagttttcttatcacctatataagacattttgactgaacatgtttaaattcatatgcggggtgagccggcccctaatatagcgtaatcagcactttatttatattgttcaaacagaaattccgacgaaaggttttccacgatatatggactgagcggcaaaaagttagcagaaatatgaaaggttttactcttatgctggtatcccagcttagtaattgcatttcatttctaatcgttcaacttcaatgactccacaaggttctatacccggaagtcatattccatttattaaagctattgacatgaaaccaattccacaaattaaactcgtggagaacactagttggcgtaacacgaaacagtatagaagcatttgtggcgttacagctagtgtttttgagtgtttaaaggagagtttcaggatacaaataacaataacgagaacatcagatgtagaaagtcgaataaaaaacctatatttttacaaaaagtgataataaaaggttgatatggtacgggtttcatactttaagatgatgatgtgtcttcactgaatactaaataaacatttccaggaggcgtttcctatgcagtctagcacatcatttaacagcccagcttaccttgaaacaaatggagtaatgaaaatcgctgatataacctatagtaataacgaatggctgaacttcgacattggaggagaaggaatttttaagaaatcaggttcttatttagttccatctcttccagtagaatttcattgtcatggaatcggtcactatgattttagcaatttagatcaattagatattgaaaagatcaatacactagctgaaatagaagggattttctgtgtaccctctatttttcttcctcataatcaattagatcaatttgcagcctttatgaaagagttccatacacaaaagagaaagggacgttaccgtaatattttaggtatttcactagaaggaccattattggccagctttgcaggcacaccggaaaaagggaattgggcacccttaaaagaagaatgggaaaagatcgcttcttgcggagaatacggtcttatttatactgtactgtccccagatgctatgactgaaaactcctatctaaagaaatatatgacagaagaacatccgagtttagaatggattgtggatacacttgtggaggctggagtaaaaccggcgctgggtcacttccaaaaagcatacccggaggaaacctctgaacttataatgaaagttatagatacagcgcaaaaacgcagcaattacactggatcagatgccgttttaacagatcatttgtttaatgatatgccaaacaattttaaacacacctggagaacaccccaagaaagagtacatagattagaggggttaaaagatgctcggttagataaatggaacatagataatatcaacacacttgtcggagaagttcccggtactttgatgagagccgcgaaagaaggtttactaaccatttgtatgaattttgatagtgaacatgtagacttagaagttgcacgacgggttgtagaacttgttggctctaagggtattatagcaatgacagatcgcattgacacagattccatgtgcggccaatcactggagaaaattgaagggaataatctgtggtatcaagggaaagggtatgtagcagcagggtcttacacaattgatcggcttatgcataatattcgtgctataggttttaatgagaaagttgtatggaatatgacatcatttgtaccattaaaagcttgtcatttcctaaatgaacttgaaaacctatccatgaagcccttcagttttatagatgaaacgaaaaaaagagctcatttcaaagcgcctgccccagagctggttctgcgctaagcaaaaaagaccaccataaagtggtctttttaagttgactttcttttcataagttttaggttcaacttatttatattggggacatctttgttattcattaagttatataataaatttgctgctgtttgtcccaactctttaataggttgatgtatcgttgaaagttctattaccttagatatcggctgattatcaaatcctataaccgccagttcttcaggtattcgtattccctgtcttttcgcttcataaatgatccccgccgcaacataatcacttcctacaaccattgccgcaggacgaggtgacttatttagcaataattttgctatttctataccattctcaatagtgtactgttcctcaaagtaccaattatcactccatttcaatccgtattcattttgaaagtgaaaaaatgatttttttctgcttatgccaacaccgctcttaggatttcctatacacagaccaatggattgatgtccttgatttcgcagatgatcaattgccattttgattcctgactcatgattaataaatatatgtgcaacctgtttgcttgcagaagcttcacaggaaacaatattgccaaacccagatatctcgtcgagtacgtgaggggggcttacacaggatcccaaaataagaccgtcaataagtttgtatttcagtctgttaaaaaactccatttcttgttcaggatcgttatttgattggtgcacaagtaaactgtaattatgtttattacactcttcgcctattccggcaatcagtttactgaaaaacggatggttgattttaggaacaatgactccgaatacatttgtcttccccctggataggttaatcgcgttgaaattcggtacataatttaattccttcatagcttttaacacagcgtcccgcttctcaggttttacataaggatgattattgagaactctggaaactgttgtccgagaaacgttcgctttctttgctatctctgtaatgtttgtcattactgttactccttcttagacagcgttatcaggattttacactgaacaacacaagggaaaataagcatttaatgaattgttttatcatggcctccatgaatatgtgcgccttcctgtcccacactatagatagaacggggcttccccatcttgtgtaatagtttgtcaaataaacctactaatatccccagacatagcagcacaatgatggttcctatcccaatcggcccctgaagaatgattgcaagcacaaaagctaaagcttcccctatcgtctttgtaatattaataccccaacctgtacgttcagtaatagccaacattaattcatcattcggtatcgaaggaaaagatgctcttaaataaatagcgattcccatagccaatatacacaaccctatcaaaaataaactccattgaagaatgacagcatctgtttttaagaacgaaagaacctttaggtttaaaaggtcaacaaaacttccaataataacaatcggaataaaaccggctagattaggaaaccgcatttttatgaggctgtttataaagataaggattcctccgacaatgaaaacccatgatccgattgtaaggccaatgagttctgataaagccacgttcagagcatcccagggggcaatcccggtattagatttaatcatacatacaacccccacggataaaataaacaatccggcaatatagattaaacaccttttcacaaaatggctcatggctgtatactccgcggtttagggtcttcttctttcgtcagaatgtaatgatgaaaagcataagatacaccacactcatcattcgataacgttttaaaagcagccaattgaataagcttcttatctgcatttcccatggctatccctattcctgctgcatgaaacataggcagatcatttaaattatcacctattgcgattgcattccgcgcatccgttccataatgttcacaaagtttatttaatgacgctcctttatctactcctgcacttgtgatttcaagattgaatgctcctgaactcgttacggcacacttcttcagttgtccaaaatattctttagctttttttaattttctttggtttggcgaaacgatcatacattttatgacataccgataatcgatagggtcaattgtacccggtatttcctctaacccgtattgatggatttgagctttaatagaattccaaaatacttcttgattaaaatgaggttcttccattactgtattgtaaagttctttttcaagctgctgaattccttgatttgatacgacaattttgtcagataagtaaagctgataatagatttcttctttatttaaccatgtgatgataggttgaattacatctgaatccataaaatgttcgaatattacctgatttcccacatcaatttgagcgccgtttgaagcaataatcggaaaatccaaatcatatttattgatgatgtgttttgcatcaaataaagctctccctgtagcgattgttacaagatgaccttgtttttgtccgagctttaaagctcttacatcttgttcctggatagttaagttctctgataacagcgtgccatctaagtcaattgcaattactttcatgtgaatttcctcctcagagtttaaaaatcattgaaagtataatgtatggtacgcgtttcagagcaattagattattatattaatttgaagtttttctccagaagctgattagacctgtgcttctcaagtgttctcctgcttaatgatccttctctggaatttcaagcgctggcaactcactagaaactgaactgtaacaggacagcttacacttatggccggcgacttgggcaccggcacttttcagagaacgatcactttttgtaaaaaccggatgtatgaagtgtcattgaggcggtgtccccgatatacttttctcttttctttcatttgcggtaaagaaaacaaaacctgattcccttatgacagaacttgctttatcataaaagtatgcgtttacattcgagtagggaggttatagcatgacccctgtgaattcaagcagcatcgggaagattcaggcggccagcaaaggtttgtcgccaaaattgagagcgattgcagaccatatcgtgaaggaaccgaaagacgtggttcacctttccatcattcagctggcggaaaaaacgaaaagctctgaagcgacgattttcaggctgtgcaaacggctcggtttttccggctatcaggatttaaaaatcgcgcttgctcaggagatcgttcaggagccggtgcagcacattcatgaagaaatgagccccgacgacgatatcgaagtcatcatccggaaagttttccgcacaaacatttccggtctgaccgatacctttcaattattagatccggccgacgttgaaaaagcggtagaaatgatccaccgcgcagacagaatcgaattttacggaaacggcggttccgggctgatcgccacagacgcgtatcacaaatttatgcgtacgggtataaattgcatcgcgcacacggattctcactttcaggcgatgtcggcgggtcttctcggtcccgaaagcgcagtcatcggcatttctcattcgggaagcaacaaggacgtgctcgacgcggtgaaaacggccaaatcgctcggcgccggcacgatcggcattacaagctaccaaaagtcgccgctcacccagatttccgacgtggtgctgtatacgtcaacaagggagacggctttcagaacggaagcaatgtccgcaaggcttgcccagctgtcggtcattgataccctgtatttcgccacggcccggctgcggcaggagaaaacgctcgccaacttgcagcaaatcagaaaaatgatcgcgcacaaacgtttgtaatcgctttttgaatatttatttttcaaaagagagaatgccgatacagcgggaattgaggcaattttatgaaaaaaattttcttcttcatcgttgatttataaaaaaattattcctataattgactttgtaagggcatacattatcaatctatcttattattcaatcagattaggcgggatatattatgaaggaaacccaagctgttatcggtctggatatcggcacgaccagtacgaaagccgttctgttcggaccaagaggcaaagtgttagccaagcattcggttcactatgatttaatacagccaaagccggcatgggccgagcaggatcctgagcacattctggaagcggttatcggaagcatcagaggcgccgtcacaaaggccggactgagccctgacaatctgcttgcaatcggcatcagcaccgccatgcactcattgatagctgtcgatcaaaacggcggcctgctgaccaaaagcatcatttgggcggacaaccgcagcgccgagcaatcaaaacggattttaaaagagatgaacggttttgatatttataaaagaacgggtacgccgattcacccgatgtctccgctttccaaaattgtgtggatgaaagaacaggacaaggagacattcgcgaaaaccgccaaattcatcagtattaaagaatatattctgcacgagtttttcggaacttatgtcgtcgattattcgatcgcttcggcaacggggctgttccgtttagatacgctttcctgggatgaagaagcgctccggattgccggaatccgggaagatcagctgtcggacatcgtgccgaccactcatcagctgcgcggccttgcgccggaaatcgctgcacggatgggcattcatgcggatacaccgtttattatcggcgcaaatgacggcgtgctcgccaaccttggagtcggcgcgatcggcaaaggcgaagtggccgttacgatcggaacaagcggagccgtgcgttcggtgacggatgcgccgattacggatgaaaaagcgcggacattctgttacgcactgactgacaagcattgggtcatcggaggcccgacgaataacggaggcattatgctgcgctggcttcgagacgaattcgcttctccggaagtcgaaacggcgaagcggctcggcattgatccgtatgatttaatgattgatatcgctgataaagtgcccgcaggctctgagggattgctgtttctgccgtttttatcaggggagcgcgcgccgttttggaatccgaatgcccgcggaacgtttttcggcatcagcctccgccataaacgggagcattttatcagagcggtgctggaaggcgtcatcatgagcgtcttttcaatcggtgtcgcactgagagatttggcgggccctgcaaaagacgtgcgggcatcgggaggatttgcgagatcgccgctttggaggcagattttgtccgatacgatgggacgggaagtcctcgttccggaaagttacgaagcctcggcgctcggagcggccgtcctcgctttgcacagccttggcgaaatggaacggatcgaggatgttcaggactggatcagaatttctcaccgccatgaaccgaacgtcaaaaacagcgaaacatatattgagctgttttacttatacgagcggctgtatgacaagctcaaagatgaatttgacgtcatcagtgaatttcagctcaaacaaagccgttaattcttctttgaaagggtgaaaaggtcatgttactgtttattgtcattgccgctattatcgttttactcttattgattacggtcgctaaattaaatccgtttatcagtcttttgattacatccatccttgtcggtttcgcaacgggcatgaatctgccggacattatcgcttcgatgaaaaccgggctcggcaatacgctgtcgctgcttgcgatcgtgctggccctcggtacgatgctcggaaaaatgatggctgaatcaggcggtgcggagcgtatcgcccacaccctgatcggccgcttcggcaaaaagaaagtgcattgggcgatgatggccgtcgcttttatcgtcggcatcccggtctttttccaggtcggcttcgtcctgctcgtgccgcttttgtttacgattgcgattgaaaccggggtttcattagtgacgatcgggattccgctccttgcgggactttccgtcgtgcacggattggttccgccccacccggcggcgatggcggctgtcggcatttatcacgccaatgtcggaaaaacgattttgttttctttaatcgtcgggattccgactgccatcatcgcggggccgctttacggaaaatggattggtaagcgcattcataaacccgttcccgaactgttgaaaaaacaatttattgaacggaatgaaaaacgcaagcttccgggattcgcaaatacattgtttacgatattggtaccggtgatcctgatgcttatggcaacgcttgccgaaattgcgcttccggaaaaaagcacgctctatgaaacttttaaatttatcggcgaccctgtcacggcgcttttgatcgccacggtttactcctttttcagccttggtttttatcagggctttgacagagaaagcattttaaaattcagcaatgactgtctgggaccgattgcttccattctgcttgtgatcggagccggcggcgcttttaacaacgtcctgattgattcaggcgtcggcacgtatatcgctgacatggcgaaacactcaagcttctctcccgttcttttaagctggacgatcgcggcggtcatccgtgtcgccacaggttcagcgactgtcgccatgatgacggcggccggcattgttgcaccgattgcatctgtcatgccgggcgtcagcagtgagcttctcgtattggcaacgggagcgggctctttgattctgtcacatgtcaatgactccggtttctggctcattaaagagtatttcggaatgacggtaaaagaaacgttcctgacatggacggcgatggaaacgattatttctgtcagtgcgatttgttttatcatgatcattaacgcgtttatataaaaacaaaccccggccgcaaaccggggtttgttttttatcggtcattcacgaggatataagcggctttaacgggtccgtggacgccgacaaccaaatccatttcgatatcggccgagttgctcggtccagtaatatagttgatgcaggaaggaacggtgacgccgtctctgatctgctgtttcagtatatcgctggcctgtgtcattctcggcacaatggaagatttcgggatgatggcgatataggtggtcggaagcaggctgacagaacggccggcatgctctgacgcatacaaaacgacggtggctgattccgcaagcgtgatctcgctgaatgtaatgcccacattcgcttgttccgctttttcaatatttttcgctccttgttccgcgtcccattcccaaacgggaatcccttcatccggccactcttctgtcataagggtctgcaagccgtacgtttcaaagcggctgtccttcggaatgatgacaggccctccttcaaagcggttcacctgcgtgcgcaaagcgtcgtaaagcccggctgcatccgtttcgatcagttcggtatgaatgttgacgcagtggtctttcagcatcgtgacaagatcgtcttccgtacagcccgcatgcgtttgatattgaggctgatacttccattcaggcagggacacgcctgatttcctgcgctctctgcccagacgttcggcgatccggtttaaaaaggattcctgatgtgtaaccgtccctttcatcatcattcttcccccttttgtttttcccggtctttaaaccaatctctgaatctcgatttatgcggcgccgggaagtcccgtattgccgtccattcttttaacggccccggcccttttgatattttgtcatcttccgtaaacggcgtcatggcggcaggcgcccatttcgatcccattttataaagggacggggatgacgagccgagcccgaaggctttcatcgccagtttttcgctgatcggcgctttgccctctttttccacaatgttctgccgatgcttgagcagcagctcgtgcagcggaattttaacgggacatgcttccgtacaggccgcgcataaggaagatgcgtacgggagctccttgtattcgtcatatccgccgagaagaggcgataagacggcgccgatcggacccgaatagatggacccgtacgagtgtccgccgacatgccggtacacgggacagacgttgatgcaggcggcgcagcggatacattgcagcaccgattgaaattccgtgccgagtatgcgggaacgcccgttgtccacaaccacgaggtggaattcctcaggcccgtcagcttctccttgctgacgaggtcccgtcagcgccgtaatgtaacttgtaagccgctggccgaccgcgcttctcgtcagcatgctgacaagcacttcaaactcagaaaatgacggaacgatccgctccattcccatcacggtgatctgcgtcttcggcagcgcggacacaaggcggccgtttccttcattcgtcacgagactgaccgaaccggtatccgcgattgcaaagttgcagcctgtaatgccgacatccgcttcgagaaattttttccggagaacgctgcgcgcgtgcatgacgagctcttccggtttttccgtctgtttgtattcgagtctctctttaaacacgtcacggatctgctctttgtttttgtgaagagcgggagcaacgatatgtgacggcggatcgtgatcgtcaatctggagaatgtattcgccgagatccgtttctgtgacttcacagccctctgcctcaagcacttcgttcatattgatttcttctgtcaccatggatttggattttacgatttttttggcgtttttctgccggatgacatcgcggatataggaggacgcttcttccgccgtttcagcgaaaaagacgtgtccgcctctgttggcgacattttcggcgagctgttccaaatagaaatcaagattgtccagcacatgctgtctgatttcttccgcatgggaacgccaatcctcccagtttcccaattcttcggccgcctgaagccttcttatcctgagccgttcctgcgctccggagacggctcctctcataaactcattatctattccttctgatacccgctctttaaaagcggcggtaccgattttcatcgccatgattttccccccttgttgtttctcgtgttatctgctgttcagcacttcggcgatgtgcatgactttgacgtttttatccttacggtcaagacgcccgccgatattcatcagacagccgcaatccgccccgatcagcacttcggcctccgtgtcttccacgcaggcgaccttctcatccaccatttgttcagagatttgcgccattttcacagaaaacgttcctccgaatccgcagcattggtgctttccgggaagcgcggtcagctcgagccccttgacatggcgcaaaagcttcatcggctcctccgacacgccgagcagcctcgtcatgtggcatgatgtatggactgtcgcttttttatgcagcaccgccccgacatcctccaccccgagaacgttgacgataaaatccgttaactcatatgttttgtccgcaagctgctgcgcttttgccgcccacttcggatcgtcctgaaacagatgcggatattcacggaacatcgtcgtacaggaacctgacggactgacgacgtactccgcttcttcaaacgcggcaatcatccgcttcatcgcttttttcgcatccgtcacatacccgctgttgtatgcgggctgcccgcagcaaatctgcccctcgggaaaatccacctcacacccgagccgttccagcacctcaaccgtcgcctttccgacattggtctggaacatatccacaaggcacgtgacaaataatgagactttcatgatgaacccctctttcatcctcaatatgtgatccggtcatctgatgacctgtttttgggaaagctctatgaatatcctacactattctgaatatggattggaaggtttttctgaaaaatcctttcgtccgatgcgctgaaggggacaaaaaaaagagaagcccgaaagctcctcaagctgctctacatcccgttttccagcagacgtcccagtttttgcacaccctcttttatcgcggctttaccggcataactgaacgacaggcgaagatattccgcaccgtcttcctgatgcagaaaaaaatatttaccggggacataggaaacgccgtgagaaagagccctcgccagcattgcggatgtatccgctcccggcgctttcacccatacaaagtaaccgccttcaggcacgtgccaggatgcggattccggaagatatcgcgctgatgcggcgagcaaaacgtcacgtttgctttgatatgcttcccgcaaggcggtgagccgtttttcaacattcgtttgttccagatagacggcggtcaccgcttgggaaaacgggtggcctaagtctttttttaaccatgacaatgccgtgatgaatgcggcgtcccctgcaatccagccgatcctcatacccggggcgatgacttttgataatgaaccggcgtacagcacccggccgttttgatccatggctttcaagggcggcggaatatcggtgaatccgagctcgccgtatgcaccatcctccaagatgagaaaatcatacgtttcggcaagctgaagcaggcgggttctccgcttcgctgacattacggttcccgcaggattctgaaaagcgggtatcgtgtagagaagacggggaagcagaagcccttttcgttttctttcctcaagcatgaacgctaatgtttctgtttgcaggccctcttgatctgtcggaatgctcatgatatgcggtgtataatttttaaaaatctcgagcgcttccatgtagaccggagcttcaacggcagcggcggtttgttcatcgaggaaaacccgtgcagccagatctatcgcctgacaggcgcctgacgtcacgagcagctcatcgtcccgacagtgaatgccgcggatggctaaccgttcttgaatctgcttttttaaaacggccgtcctcgggcttcccatataatgcagcggcagatcgcgctcctcatccagaaggcgggcggcggcttctttcagttccttatcaggaacgagggcgggatcgggatagccggaatgcagggggatgcacgctttcggaactgccggcatccattcccctggaggatcgtttgtcagagctttctttacatggtcagaaaaaaaagattcggcctgcatgtgatgttatcccctttcacaagtcagcttctatacattttcttcaaaataagcccccagcacgtcttccacattcgtcaggtgcgcggtcatcgcggcttccgcttcatccgcgtctttggcggcgacggcactgtaaatgcgttcatgctcttcatacaatcgctgcacgctcgttcttttagaaaacagccaaatttttctcgtttctctcatcgtttccaaaaggagcgcggagacatgattcatgagatgcttgagcagcccgttttgtgatgcttccgccagcgccatgtgaaaggagaaatccgctttttcgcccaattcttcgtctccgtcaatgtctttcatctccaggagagcctggcggattttttgtaaatcgtcttcggtgcgtttttcagcggccatggcggcgacgccgagttcaagcagctttctgacttcgagcagctgtttgacgtcctcttttttcatcaagagggcggaagaaagcggctgggaaacatgagacggctcaaattctcttatgtatgtgccttctccctgcttcatgtcgacgagccccatcgctttcaaagccgacagcgcttctctgaccgccgagcggctgacctgaaaactctcagaaagcgcctgaacggaatcaagcttttcacccggcttaagctcgcccgcttttatcttctccagcaatgcgtcagcgacttcctcgtagatttttttcgttttaatttgtttatatttcaacgcgatcaccccgtcacttgtgaatcttgatgtttatcgtctattatacttctttttttgtattgccgacaggttcagacaatttgttcaagaaaagtattgtactttcaaaactttcaaaatataatgctaattaacccggtcatcagatgaccttatcataaaaagtaatcgcttacatgacataaggaggggttttttagggatgcaatggacacaggggtacgctcctttagggggaaatttgcttttatcggcagcttgcgcgctcgtgccgattatcttctttttttgggcgcttgcggtgaaacggatgaaggggtacatcgcggggcttttaacgttagccgtttcacttttaatcgctgtatttgtttacggcatgccggcggaaaaagcggtgatgtccgcttctcagggagcggtatacgggctgcttccgatcggctggattatcgtcacatcggtctttctgtataaaatcaccgtgaaaacaggacagtttgagattatccggagttcggtgctctcaattacagatgaccggcgtttgcaggcgctgctcatcgccttttcattcggggcgtttttagaaggcgccgccggtttcggcgctcccgtcgcgatctcggccgctttgctcgtcggacttggttttcagccgctgtatgcggcgggaatttgcctgattgccaatacggcgcccgttgccttcggcgcgatcggcattccgattaccgccgtcgaaggtccgaccgggataccggcaatggaaatttctcaaatggtcggccggcagcttccgtttttatccgtctttattccgctgtacttaatcattttgatgagcgggtttaaaaaggcttttgagatatggccggccattcttgtttccggcatctcctttgcggccgtgcagtacgcaagctcgaattttttagggcctgagcttccggatgtgctgtcggcgctagtttccatggccgcgctcgctctgtttttgaaattttggaaaccgaaaacggcctttcgtttcgcggcagaacgggaatcagcagcggccgctgaccggacgcagatcaagtacgggggcgccgcggtgtttaaagcgtggtctcctttccttcttctgacggccatgatatccgtctgggggattcccggcgtgaaggctgccttaaccggtcattatgaaggaacgtcaatgtggctttcctggctgaatgcagccgggcgtgcattgaccttcacgcctcccgtcccatttgtaaatcagcagattcttcaggcggacggcacgccgattgaagccgtgtacaaacttgagcttttcggttcagcggggacggcgattctgattgccgccgtcatctccaagttcgccctcggcatgtcgtggaagacatggggcgaagcgtttatagaaacggtgaaagagttaacgcttccggtcgtgaccattgtttctgttgtcggctttgcttatgtgacgaatgcttccggcatgagcacgacactcggtcttgcgcttgccatgacgggcgcgatgtttacctttttttcgccggtgctcggctggctcggcgtatttattaccggctctgatacgtcggccaatctgttgttcggcggattgcaaaaggtgacggcgctctctgtcgggatggacccggttctctccgttgccgccaattcatcaggcggtgtcaccggaaaaatgatttctccgcaatccattgcggttgcctgtgccgctgtcggtctggcgggcaaggaggccgaccttttccgttttacgattaagcacagtctgtttttgcttctgctcgtctgtctcattacatttttacagcatcatctgttttcatggatgatcccgtaacacggagaacctccccggggtttggctcggggaggtttcagctgtaccgttttctcgccgatgacggcggaatatttaattggtcacggtatttggcgacggtgcgccttgagattcggatgtcatattgttcatgcagcagatcggcaagcttttgatctgaaaaaggtttctttttatcttctttaccgaccaatgcctccagatgcgcttttacggcataattggaggcgccgccgtcccccgacgattcagctttcgccgagaaaaatgttttcatttcatacagtccgtacggcgtctgaacgtacttccctttgatggcccggctgatcgttgattcgtggagctccagcgtttccgccacctctcttaaggtcagcggctgcattccgctttttcctgtgagaaaaaaggattcctgccgttcagtcaggacgccgataattctcgtgatcgtttgttttctttgcgacaaagcccggttcagccagcgccattcctgatattttgccgacagataatttttcgtgtcacggcacccggcagctgacaagagcggctgataatgggtatgaagctggatatcaggaaacgaacggctgttgagccgcgcttgaatgatgccgtttttcactgtgatgaaaatatccggttccacgtaaaaacccggctcctcatgcgcataacggagccccggcctcggatcaagggcgctgatcatgtcagcgatgtcctgaatgtctttaagcggaatgcccgtttccagtgtaagcgctttccagttctttcttgcaaatagctcaaaataggcgtcggcaatccattccgcctgttcgttccgctcgggaagacggcggagctgaagaaggatgcattcctgcaaagaccgggcgccgattcccgcgggctcaagggattgaagctttttcagaaccgcttccgtctcctcttgtgaagcggatacatggtcggcggcagcttgtatgtcctcttttaaatatccgtttgagtccaatgaatgtatcatataattgaaaatctttttctcatcatcggacagcttcatatctaaggcttgctgtttgagcgaatcctgcagcgttttgcgggtaagtctgatctgctggcttccgtcccgttctttcatcctgtttttacttgttttatggtaagatagtggcggcgtgtctgtttcctttcgttcaatcagagggttttccagtgagagctcatcaatatatccggccagttccgcggaattgtatccgagtaatgtgatagcctgtttaagctcttgcgttaattgaggctttaacatttgtgtttgctgaagtttgatatccatcatgctcactccccttttttcattgtacatgattggtttcataccgtatatacttattaaaaggagttgctttatagatgtcagaacttttttctgttccttattttattgaaaactttacacagcacattgaaatgaatccgaatgaagaccgaattcatgcgatgaacagctattaccgctccgtcgtctcaacccttgttcaggatcagctgacgaaaaactcggttgtgctcaaaagaattcagcatttggatgaagcgtacaacaaagtaaaacgcggagaaacaaaataaaccttccgctcattcaaagcggaaggttttccttcgtgccggcggtttccccgatcagacggacatccggcgcttcgtgcatccaggtgtgataatagttggcatttttcccgtatgaattatcaatgacggtattcggtttcccgagaagcgaggacagaatgtggccgtgaagccttgacgtttccaccgattcgtacctgctgaaaaacaggaccgcttttttcgttaagaaatcggaatagcgtttccaaaaccgcgcaatcggcagcgggtttcccgcttttttattcaaaacattcagcgtttggaaaaaagcgattcccctgcggtcgcttgctgacagcacatcctgccagtcgcagcttttaacggaagaattgttttgcagcttcggattgatttccccatccgtgcggataaaatgaagcctgccgcgtgacggagccgctgacgccgccatcggatacagctgatgggccatgtcaggcataagcccgatatgattcgccgaaaaaaagcatttcgcggtctcgtatgacacatgatctctcgtaaacaggtggagatccttgtgctccgcaaaaagcgccgatgtcttctcaagccgtgtctcatcctgataatagatggattgcggcaggatgacgatcctgttttccggaaaggatttgacgattttttccctgaacgtctgatagtatggatagagatccccgaaatttccgccaccctgacagacgatgatcgtctttttgtccgcccggcgcccgaatggaaaattgtcgggattccagcgctgtttcacgcggatgccgtgcgctttaaaaaacgcctccgtccctttcattatcaataaatcccctacatttccgtagaggggatagtcggcatatatgatgtcagattgcggcggtataacgctgagcagacccgtcagcgtctcttttaatcggctcataacatggcggctgtccatgttttctcccctttcgtttcaaacaattgcgcaagtgcgtcaatgacgcgctgctgctcctcagaagacaagtcagacccggacggcagacagatgccccggctgaaaaggttctcagagacacgctcatgttcgctgtgaggataaaagacggaagatgagaaaagcggctgcgtatgcagcggtttccacagcggccgggcctcaatgttctgttccgcaagacaggcgacggcttcttccggcgtcacgccgttatcaagcgtcagagccgtcagccagcggtttgaaaccgttccttcaagctccggcatcatgcggatgcccggatacgtttccagcgcttcccgatacctgtgaaagatttctctcctcgcccggacgcgatcttcgagcacttccagctgcgatatccccacgcccgcgagaatgttgctgagcctgtagttatacccgagctcgctgtgctggtaatgaacggcggcatctctcgcctgggacgcaagaaacctcgctttttcaatcgcggcctcatcgtcagacacgagcatgccgcctcccgatgttgtaatgattttgttgccgttaaaggaataaatgccgaaacggccgaacgtgccgctctgcctgcctttatatgttgatcctaaggactcggcagcgtcttcaatcagacagacgccgtatgcgtcacaaaggctcattaattcatccattttcgcgctttggccgtaaagattgacggcgatcaccgctttcgggagtctgccgcgccgctttgcatcccgcagcgcccgctcaagcgcatcgggcgacatattccacgtctcccattccgaatcaataaaaacgggctcagcctgctcatacacaatcggattcgccgtggcgacaaacgtaaaggaaggacaaaatacaacgtctccttttttcacacccgcaagcctcagggcaagatggatggcggccgttcccgagcttacggccgccgcgcttttcactcccgcatattccgcgagccgcgcttcaaacgaattgacgagcggaccgagcggggcaatccaattggaacggaaggcttctgcgatgtattcctgttcttttccgctcatatgaggcggagacaaataaatccgtttgtttgtttgcatgaaatcatcctttttcattatggataggggagatgacgcgggccggaacgccgaccgccgtcacatggccgggaatccggctgatgaccgcagcccccgcgccgataacggaccaagggccgatatcaatctgcggtataacggacgcgccgattccgatgtgcgttccttccccgactttcactccgccggcaagcgccgcgcgcggtgaaagatggacgtaatctccgatggcattgtcatgatcggcaaccgcccccgtattgatgatgcaatgggcgccgatgtcagcgcccgcctgaatgacggcgcccgccatcacaaccgttccgtgtccgacggaagccgtttcactgacgatcgccccggggtgaatgagtgcggcataatcgtcatcttcaagcccaagcgtttcagcgaactgctttctgacgccgttgcggccgatgcatatcgtgaacacggcttcggggacgagtttccgaagcatgggcacgtcttccgtccggcccgtatataaaccgttccgaacggcaaaaccgctgaatccgtcatccaatacgcccgcaagctccatatcggaacgggcctgcacgatttccttcacgacttttccgtgtccgccgtttccgatcagcacgacctttttcacgatgacatatctccgctgcctgtgaagcgctttgccgtcacatggccggcttgatgtatgccttctgacacgagaacttttttcactgttaaaagcagaatctttaagtcgagaagaaatgtgcggttgtcgacgtaccacacgtcgagcttgaatttttcctcccatgaaatcgcgtttctcccgttaatctgcgcccagcccgtaatccccggcttcacctcgtgacgccgcgcctgctccgccgtgtaaagcggcagataatccatcagcaaagggcgggggccgacaagactgatatctcctttgagcacattaaaaagctggggaagctcatcgatgctcagttttctgatcagccttcccgttttggtcagacgaagatgatccggaagcagcacaccgttttcatcacgcgcatccgtcatcgttctgagtttatacaacgtaaacggacgcccgttatgccccggtctcgtctgtttaaacaataccggagacccgatggcgcatctgacggctgccatggcgaagagaaggatgacgctcgcgccgcacaataacaacaccgcggccgctatatcaaatacacgtttcgccttcaaatctgaacagctcctttcacttttcggcatttctgtaaagcaagccgcctttcttctttcgtacaaatgaagaaaaaagcgaatgcggcatagctcatgcatacggcaagccccgcggcgatcaggccggcccagctgtcaagcggtgaaaacagccggataccccggcagacagcccaggcaaatacggccgccgccaacgggccgaacatgcctttgtaaaacgcggttttctgaaaaccggtaatatgcgaaacatacagcggcgtgaagacggcatttttcaaaatgagagagactgcaccggcgatggtgatgccgtacagtccgagatgagccggaccgctgagaaccacggccaatacgacattcagtccgcctaaacataaagtaacgacggcgggcgttttttgtttattaaaagccgtccatacgtaaaaaagcggcatgacagagagactgaccgccaaatacccggcgtgaatgtataaaagcggcgccgtctgcacaaacgacgggcccagccaaatcgccagaaacggttcggcaagccctcctaataatgcggcgggaagcgcgaggagaagcccgttcatccgcacagccttattggcgtaagacaggagaccttccatatccccttttgagtaataggaagtcaaaaccggcgcaaacagtgaagcaagcgtcccggcaagacttctgagcaggagcgggaattgaataatcgccgcatagacacccgcctcagacggccccagcacgaggttggccgtcatgagatcaatctgcagaaacagcagcacgccgatctggttgacagagctccaggcaccggccgaaaacagcactttgctcgtctgtaatgacaaggttttacggctgaaagaaaaccacggaatcaatttcttaaagaagaaaaaagtcagcacggccgcacagacggctcccgctaatgccgaaagctggatctgccagattttcggcggcaggcacgtaaacagagcgagcacacacagcaccctgaccagcatttgcacggcctgaatggaacttgtgatataaagcttgttggcaaaaaacggccccgtcgcgaaccccgccataaaaaacgtcagcataaacagcacgctgccgatcacgatagacagcctcacatccgttaagagcccggccggcacattcataatcttgtcaataaaaaaagcagtcccggcgagcggcacagcgagtaatagagatatcacgacagacgcggctaaataattgcttacatacgcattggcctcatccctgttccccctgtgggcggcgacggagaaaaacctcacaacgacagagctcagcgcaacggtaataatagagaaatagttaatgatattctgtgtcagatggacaaatccaaaagcctccacacctaatgttttcacaataaagggcgtcatccacactgataaaaacaccgatagtaaaaacgccgtcacattggcgccgaaattaatggcaaatttcatgctccttccgcactgcctttctctttcgatttccgttcgaaaaacgcatgcagaagaagaggaaggcgcattttgcacagaccgagcaccacgcgctcccccgccagcagctgtttatggcggcacggcgtcctgcgcaccgccgtttttaccatgtcatacgttaagattctgccgatgtgcgccgtaatctgatgtgacggctgcggggcggcgcatgcgttggcgatcagcatcggaatctgatgcttgcacaaatatgtatcgatatcgctccggcacgcgtccgtcagcccgttttcctcataaaaagccattttcgctttatattgcttttgcagttcttgatctaagtggggcttaaacggtgtttctgtaagactttgcggattttcccggtagatatacagcccttcgtctatcactttgatacgcgcggctcggcggaacgctgccaagttaaacggagagtcctcagcaaaccggatatcttcatggaacagcagcccttgcaatgcttctttccggtatatatagcgccacacataccaaataaaccgatgttcgtgcgcacgggtcagcaatgctgtcatttcatccgctgtgaagacgcggcccggcggaagggacggcggcatatatgttcttttcttagacggcgtttctttataatagccgcaaccggcgatatccagccggttcttctccgcttcttcataaagcctttcgaacatcgtttccgtcacatagtcatcgccgtccgcaaaaccgatataacggccgcgggcggcttttattccggcattgcgggccgagctgaggccgccgttttctttatgaatcacccggattctcgcatcttctgcggcgaattgttcagcaatccggcctgaccgatccggtgaaccgtcattgacgaaaatgatttcgatgtctctcagcgtctgttttgttaaagaaaccgcgcattctttcataaaaggctctgtcttatacatcggcacgatcacgctcacaagcggcgcggtcattgggcatcaccgctgattttcgagcgcagcccggcaaaataaacactgcgcaaagaaccgccttcctcatgcttgccgctgagcatccggtttacggcggacgttacggcttcagggtctggacgttcaagcaatgtcatgttcggtatgtttttcagccattgatagccttccatcactttatgatcaaacgaacgaatgacgacacaaggcgttttcgtcagcgcacaaaaaatcatcccgtgaagcctgtcagtgacgacggcttccgcgcctttcagcgtattccaaagcgcctccagctctttttcacgtgtatggcggctgaccctccggccgaccgtcgtcgtaaaggaatgcagctcgccgtactcttttgccaaagcttctttaaccatcgttctgtcctcagccgtcagcgcactctccttatcctcccgtaaacagaggtagatcccttcccgcgggatgtgccgctcgcttttatccaaatataagaccatgtcaggctgtttgagcactgtttttccgggaaaatgacgcttcatccattgatacgtcgtctcatctctcgccattaacaaaaggtcgggatgcgcattgtacacttttcgggcgcgcttcagttccttccgtcccttttttgattcagaaaaatgagccgtcgccggaagctgaacgatccgatattgccggaatgttttgatgataaagcggcgcgtccattcctcataccggtacaaatcccccatgttcccgccgccgatgatgaataccatatcatcggggtggcgctttttgatcagcgcttttgcggatctgtatatatccttcatatccacctcgacaatgtcaaaatcgggatactcccgttcaagaaacgttttgcttgcgtaggcgatggcgtgatcgccgagattatcgtgggacgggagcagcgtcagaatgatcttttttcttgccgctgtaagccccgccccatccgctgccgttccgaaatgaaattgggacgggtatttgaccttaagcaacagccattccgcaagattgatttttaaagattgtatcgacatgtcttcaccctctgattttcattttgtactcgattgcccgctgatacgcggctgatgccagcgacacgaacggaatcagcttcagcttcgccaaaagcagaaggcatgagcgtttggcgtcaaacggcgccgttccggttttggaaaggctcaggcgaaacacgggatcagcgcatatccggctgatattcttccacttctcagaaaaccggccgccgttattccgcttccattcattcagcaggcagactgttccgtgctgaacgatgaaaaaatccagctcctgccggtattcctgtaagcagccgttttcacgcaaaaaagcctcgttcagccgatagagaacgagacctgagtcaaacagctttttctgatagctttgcacaatggaagtcaagtgaatccgataatgatagagcggctgatccacgtacgagaccgcacctgcgaaaacatgcgaccggaggctgaagtactgatcctccacgtgctccagctcatcacgaagcggaaagcgcagctgatgatgctcgatcatggttcttttgtacagcttgttccatgaaaaaccgctgactcttccttcaaataaatctttcaggtacagttgtttcgggcgccccgcgtacgctgaagcgatcgttgaaacggcggttttccccgtatccgcaaactcggccgcatattcgcaaatcacgagatcagcctgatcagccttcgctttttcatacatgcgcaggcaataatcaggttcaacccagtcgtccgcatcaataaaagcgataaattcgccgcgcgccgcctcgatccccctgttgcggaccgcgccgagcccacggttttgctgatgaatgacccggattctctcatcccgcttctgataggtttcaagaatcgccgggctttgatccgttgacccgtcattaacggccacgatttcgatattggcgagcgactgattgagcaatgaatctaagcatctttctaaataagtttccgtattatacacagcaattaataaactgaccgcgggtgtttccatataaacctccaatgtccattaccgggaaaaaatcgttctgtacggaagcacagacgaatcgaccggcataagcaagtaactgtaaagaaaataacagacaataatggcgatataaatcagcgcatttgatttttcatcaaaaattctcacaaaataagggatcaagatcatttggtacaggccgaaatatatattaaaccgggcgaaaataacatcctttgtcgccaaaagaccgaagagcaggccgagcagacagaaattcacgatgacatcaatgtcgggccagagcttccgcagccgctcccgatagcagaaagccaaaaacagcggcagaagcagcaccgcgatttttacgacgttcatcccgttcgtattggtcatcagccatttctcataatggccgtatgagctgttttccagcacgacgacaaaaagcgaaatgaacttctgatacagaaacgtcataagaagaaacaatgccgacagtccgaaaatcgcgggcgaccaggctttttttctgacgagaaaataaaccggaatcataatcagcgctgaggaatgaaaaagcgaacacagcagcacgattgacatataacgcttccagcttccgctgatcacgtagcggacggcccaaaacaaaacggccgccaccatatactgcctgatcccgttaaaggaagcgtaatagtgatacgtgcccaaaaacaaaaacacactcagctcaaacggacggccgaactcaacgagcccctttaaaataaagctgcacgtcacgaccgccacggtgaaatacatgatttgcggatctttcgtgataaaattcatgagccagatgagagccgtaaaccccggatcaacggctgcttttttcgctccgaacccgaagatctcccaaatgctgccgtaatttcccgccagcttgtacatcagcgcgtacgtctgaaaatccgtcccgactctgtagcgcaaaccggagaccaatacgagcgatagcagcggaacgatcatgacgagctgattcggccggtatccggtcgaaagcgattgatcacgcccgccgcacattttcgcgaaccatgaccaaatataaacaattcccatattgactacatatacaatcattcgttactgttcctttttccaattcatattgtaaagcttcataacagcccccgcattttctcccgcgtcatatccctgccgtctgagggtttctttaatgcgcgccccgtcaggctttgccgcctctgctgcccgtaacaccgcggatgcccattgtccgggcggttctttgaggctgagccttttgaccagcccgagcccggcatcggcttcttccgttatgccgtctgatattacgcacggcaccccggaggcctgcgcttcaacgagcgtgacgggcagcccttcataaagagacggcatgacaaatacatccagcgttttcagcaggacatgaacgcggtcttctatgccgataaaacgcacatcatcatcaagccccagcttcgccgccagattttccatatcggtgcgaagcggaccgtctccggcgagaatcagctgtaaaccgatgccccgctctttcatatcagcggccagccggagcagaaattcgtggtttttttcttctgtaaagcggccgatatggccgatcaccaaacggccgcctgcaatgccacgcttccttttttcagcttctgtgtccgcgcacccgccggcaaataagtcgagatcaatgccgttcggcaaaagatgcacgtctttttctttcccgaataagaaacggcccgcgtcttccccgcaggcgcacagtgccgtggcgtttgccgtgatcagccgtctgaaaacaaacagctgcatcccggcaagccgcgacgcccgcccccgccacgacgtactgtgcgaatggcagatccgcaccgggacgccggctaaacgagcggcaagcgcgatgaatcccgactgaaaatcggtatgggcgtgcacggcggcaaacgggcctttttcctgaatcacccgcttgacctgtttcacaaatgtaatcgggtttgtgctgccgatgctcggcacataaaaaagccgtccgccgagagcgagaatttcctcatcataagcgcacggatcgttcctatgggttaaaaaatcaaactgcaccttcgttctgtccatcttccggtacaaattcatcatcatcgtttctgcgccgcccctgttcatcccgctgaagatgtgcagcacccgcatcggtttgtcagtcatgttcggcaagcccttctttttggcggatgtccctgtttttatgataacggttcatgaccgcgggcggcgtaatggcgcggatgagcggttttgcgatatacgcgtaatgggaaagcggcagcttcagccgtctgcatgcctgaaaaacgaggaccgcgttatcaatggaatacgtaaacgatctccttttaaacgcatcactgtcctctctgactttatacagcgtttcttggagattgtacccccggaaacccgcttcaaaaaagcgcagccacaaatcgatatcctccatccgccgcgtccgcctgactgaccggtagccgccaagcgctttgtacgcttcagcccgcatcataatggtgccgtggcagaacggtgtgcctttcgccataattcccggtttcggcacgggcggcaaaagccgggcgccccttacaccgaattcgtcaaatacgagcatccccgtgcctacgacttgatagtgggcgtgcttgtttaagaaagcggcctgtttttccagtctcctcgggttggagatgtcatcaccgtcctgcctggcgatataatcccctgttgcgtatgtcagacagcggttcagcgaagcggcaagccgttgatttgtcttattttgaatcagcgtaatccggtcgccgtaatgatccgcgtaacggcgcgcaatctgatacgttccgtcagttgacgcgtcatcacacataatcagttcccaattcttataagattggctcaggatggattcaatactctccgctaaagtctcttcgcaattataaattcccatgatgacggaaattttcggttgtgctcctgcattcatacgcttttctcctttttatccatataaccggcgtaaatgtgcgccatttcctttaccgtacgtgtttcagaaaaacattccgccgtgctgcgccctttttgccccattgcttttcgcagacacggggagcggtacagcttttcaatccgatcggcaaatgccgcgctgtctccggccggcacgagaaaaccgttcacgccgtcttcgatgatctcacggtgtcccctgttgtctgcggcaacggccggcttttcggcagccattccttcaagcagattcatgccgagtccttcacggatgcttgaggcgacagacagatcggcaagctgaatcagttcatgaatatcgcggcaaaaaccgtaaaaccgcaccatgtcggatacaccgagtgattcagccttttttctgtacggcgcttccatcgcgccttctcctgcaaatacgagtttcagctccgggatgcggttcttcagcagtgccgcagtctcaatgagaagtccttggtttttattgccgtttaattcagcggggtatacgagaataaattccccggcgccgaagccgtgtttttctctcagacgttcactctcttcccggctcacagggcgaaacctgtctgtattcaccccgatgccgtgtatttttttcgcgccgcaagctgtttttttcatttgcttggcccgttcgtaatcctcttcattaatcgtaattaaacaatccgtgtaagaagaaagaaatttttcgatcgggtaataaagaagccagtttttcagaggcgctccgtcacagaagtgaaagccgtgcgcggtgtacagcacctttgtccctttttggcgcgcttgtctcgcggcaaggcgtgcgagcacgccgccgaccggcgtatgacagtgaatcatgtcgtagccgttgtcctgaatgagccgtttcagccgcctgtaaacagaaagattttcgggatgaaacggcgagcgccggatcggaatggaaaacttttcatcaacgaacggaagattcatattgccgcctgccgcgacgtgcacctcccagcccatatcctgaaaccattgaaaatacggaagatgaaaggctttaaaatgataatcgacagtggcgcagaataatacttttttcgtcatctttctgtcctcccatcacacgcctgcggccgcttcttcatgtactgattcgatcgcctcaaacagcctttttctcagctcttcttcaggcagacggctgaattcctccataaaacggatgagtacggcccaattcccgtccaccgctttcccgatatggattttcggaaaaatctgctccgtatgtacttcattatgattcagcaattcttcatacatcttttctcccggacggatgccggagaattcgatgggaatctgttctgtcgtatagcctgataaatgaatcaggtttttggccagatcgacgattttgacgggttctcccatatccagaacgaaaatctgccgcccttttgcaagcgcccccgcctgaatgacgagtcttgacgcttcgggaatcgtcataaaatatcttgtcatcgccgggtgcgtgacggtgacgggtccgcctttttcaatctgctttttgaaaatcggaatgacgctgccgcggcttccgagcacatttccgaaacggacggcggcgaatttggtgctgctgacctttccgaggttcatgatgaccatttccgcaaaccgtttcgtcgcgcccatgacattggccggattgaccgctttgtcagaagaaatcagcacgaatgtttccgttccgcacatgtcggcggcttcggcgacatttttcgtgccgataatgttgtttttaacggcttcttccggattatgttccattaacggcacatgtttatgggcagccgcatgatagacgacgtgcggctcgtattttttcatcaaagcaaagattttatctctgtcctgaatatcggcgatctccgcgtgaaagagcacctctttgccgaagcgtgcggacagctcggtatgtacggaatgaatgctgttctccccgtggccgagaaggacgatttcccgcggaagaaacgcgctgatctggcggcagatctcagaaccgattgagccgccggcgcccgtgaccagaatcgtttttcccttgatgctgtcagaaattttgctcgtatcaagggtgaccggctttctgccgagcagatcttcggcttttacatctctgatgtgtccggcagcctgcgttccgagcaggatctcatcaaattgcggcatgattttaatatgggcgcccgtctgcacacattctttgtataacgtctgaagctcatgggtgcaaagagacggaatggcaatgatgatatggtgaattctcagcctctgcaccgccggcataatgctttcttttccgccgatgacgggcaggcccatgatttcaagcttatgctttgtctgatcatcatcaataaaagccacaggcatgattccgagatcgtttttctgggtaagctgacggacgagcagcgtccctcccgcacctgcgccgatgatcagcgcccgggaagagtcattttgcttcctgccgatcgtttctttcagcacccgtgaaatcatccggcttcctccgatgaacaatagctgaaccatccagctgacggccaacagccggaacaaaatcgtgtggaacaccccgtattggacggcggctgtcacagctgcggacagcgtgatccccttcagcagatcaagcagctcgcctattcccgtgtacgtccatacctgcttatactggtgaaacataaaagcgcatacatgatggctgatcaacatgctcacggcagtcagcagcaacgctccggagtcataaaagtgataagaatcctcaaaaaattgatatcctataacaacggaaagtaaaacgagatacgtatccaatgcaaaaatcattgaaagtcttctccggtaagtcaatctttcccctcctcatttatcggtttagctgatacggttttcgtaaaaaaacagacataacagctaagccgataacaatgcatcatcttaagataaattgggcatttaacccgtcctcacaccccgccaccgacgaccagcatctaaggcagcgaaaaacgccgcccacagcagagccgagtgcctccgttgataaaggtaaggagacatcacctgcaccgctcaatacgagtagtgctccgtttttttgattttctttttattcagcagcgcccccaaaagctttgcctttgactgctggagcgcgtctctcgccttttggacggtatccattttcgtttttccgctcaagacgacgagaacgcttccatctgtctggttcgctaaaatctgtccgtccgccaccgccaaaagcggaggtgaatcgaaaataaccagactgtaccggctgtacatctcctgaatcagctctcccatcgcctttgaagataaaagctcagccggattcggcggcgtcggcccgctcgttaagacgtaaaggttatcaatcagcgttttttgcaccgtttcgccgagggaagcgtttccgactaacacattcgtcaggccttgtacattttcaagctgataggtctcgtgtatcgtcggttttcgtaaatccgcatcgacgagcagcacctttttttcctgctgcgcaaataccgcggcaaggttggcggcgctgaatgattttccttctcccggaacggaagaagtgacgagaatagagcgcaaatgggtctgaacagaggagaactcaatatttgtccgaatggtgcggtattgttcagccaccaatgatttgtgatgtaaaacggatatttgagccagtccccttcttgatttcttttttctgaatcccaaacgcctcactccccgaaatgtttttcatcagaccgtgtctgctgatttttgatgtcatacacaacccctaaaacaggcaagtctgttttttcgctgagctgccgctcgcttttaacggtttcatcaagaaaatggagaaaaaacgcaagcgtcacacccgccatgagagccgcaccgaacgccatcatgatattcctgatgcgcgaaggcttgaccatcgggctttccgatgcttttgcctcagacaaaacaatgacgccttttatattcatcctgtcacggacttcttttttaaatgtcttcatcagcgtgttcgctatagcggcggcctgtttcggattctcgtcctgcaccgctacggtaatgatctctgaatcggtttcgctgcttgtcgtgatctttgcttttaaagcggatgccgtctcagaaagatgcagcgtctgcttcactttctcaagcactaccgggcttttcattatcgtttgaaacgtattgttgtaatgaagattcagctgaacgtcgctgagattcgaatttttttcaccgcttgtttcatgaatgagcacttgggtcgatgcctgataaacgggcgaaatcacccggaattggatgtatcccgtcaccagcgttacaactgctgtcatgataaaaatcagtaaaaatctgtgtttaataatgtcaaataattctttaaaactcatattctcattcatgtaattacagcctcatccttattgcatcaggcttaaacgcccccttctgttaatgattggattataaaagaaaaggtcgaaatttgaaaatttcaaattaagccatttagttctttttaaagaacattatcatgattttcctcttatttactgcacttaccttataattttaaattttataaagaacgaaaaatttcttataatgaacaaaaaatgccagtatacaggggagaattcagcacaatgattggaagaataattcgtttataccgcagaagaaaaggctactctattaatcagctagcagttgaagcaggtgtctctaaatcttatttaagcaagatagaacggggggttcactcaaatccgtccatccaatttctgaaaaaagtatccgccaccctgcaggtcgatctgacggagctttttgatgccgaaacgatgctgcatcacatgggaggcacggaagatgagtggcgcatccaccttgtgcaggccgtgcagtcgggcatgccgaaagaagaactgttcacctttacgaacaaattgactgaaaaacgcccggagcccgcaccctaccgcaacagaaaactgactgaatccaacattgaggaatggaaagcgctgatgcaggaagccaaagaactcggcttgtccgttcaggaagtcagatcatttttagaacggaagcgttactaatgatatgttgatgaaaaggcttttattcgcttcatgtcttcatctctgtttataatgaaaagaaaaaaggggatgaaatcatgacaaaacttaccgttcaaacccgctccggcgcactgaaaggaactgccggccgcggtgcccgcacatggaagggcataccgtacgcgaagccgcccgtcggagagctcagatttaaagcgccggagccgcccgcaccttgggacggcgtaaaacatgccgattcgttcggaccggtttgtccgcagccggatgatatgctgtctatatcgttttccggagatgtaccgcctcaatctgaagattgcctttacctcaatgttttcgcccccgattcagagggcgaaaaaaagcctgtcatggtatggatacacggcggggcattttatttaggtgccggaagcgaaccgctttacgacggatctgcccttgccgctgacggagatgtcattgtagtcacactcaattacaggctcggaccgttaggctttttacatttgtcttctattcatgatgcgtattccgccaatatcgggctgctcgatcagatcgccgccctgcgctgggtgaaggacaatatctccgaattcggaggagacccggataacgtcacgatatttggtgaatcggcaggcggcatgagcatcgcctcccttatggcaatgcctgacgcaaaaggcctgtttcataaagccattttagaaagcggcgcctctcatacgatcccggcggacatggcaaaagacatcgcggcggcatttattcatgaagccggcactgatcaattgcaggagctttccgttaatgacctgcttaagactgcggataaagtgcggcgctcactagatcaaaacatttttcaacttttgtttcagcccgccatcgatccggccacattgcctgcggaaccggtgaaagccatagcaaacggagccgcagaaggcatacctatgatcatcggaaccaatcgtgatgaagcatatttgtttttcacccctgatacagacattcattccgagaaaaagcagcaagattatttgcattattacctcggagagaactgcaccgagcaagcggcagatttatatccgcattcattaaagggacaaatcgatatgatgacggatctgattttctggcggccggctgtcgctttcgcacaaggacagtcgcagcacgcaccggtctggatgtaccgctttgattggcatggcgaaacaccgccgtttcataaagccgttcacgctctggaattgccgtttgtgttcggaaactttgattctttgagaaagacgctgcaagaaccgctcggtgatgacgcagaacagctttccaaacaaatccaatccgcatggctcgcttttgcaaaaaccggaaacccgaacacctctcacttcaattggcctgaatatgataccgattcacgcgaaactttgcttttcaacacggataccgctgtcgaaagtgatcccgattcagcaaaacgccgcatcctgtttcaagcataaaaaacgccaagggagccggctcccttggcgtttcgttttcatcttacttcataatgcaactccgcaaattgcttatagcgcctgacatcagtcagcttcagacctgtctcccggtctccgggtttgaacaaagaaattccgcggccgagcagaacgggtgcgatctgaatgataaactcatcgacaagtttttcctccaaaaccgggtgcagcagatcactcccgccgacaatccaaatccgcttgccttcttggcgtttcaatgcttttataaaatcggcaggctcttcatgaataaaccgcacatgttcagtgcccccggtcaatgtccgcgaaaacacatagcattctttacctttgtacggaaattcctcaggcaataaaaccaatatttcctcgtatgtttttctgcccatgatgatcgtatcgacagattcatagaaagcttcataatcggtgctgtcttcaccttcagttccgattaaccaatctaaagaatgattttcccgcgcaagatagccatctgcgctgacagctccgtaaaaaacgagctttctttgaccgctcataaaaatccctcccccttttttattataccttaaacatgcgggtgaaatgaaaaataatagaatcgggtaaaaaccgccgttaccgggttttcgtttcttcctgctttggagatgctgttaatatgccgtctatccatcttccggtaatcggcataaagaaatgaaggatgatcccgcctaaacaaacggttaataacgttccgatgcctaccggaccttttagcatcacggccagtatgaaaaatatgaagtaaatgaccgttcttgaaaaaaagatgcttctcccggttaattcgcggacaattagcgttaaccgatcaaccgggatcggtgcgaaatttgtgtgcaggtaggttgcggttcctatccctatcacaactaaaccgattgcaaaacagcccgcctttccgtaccatagttcaggcgttatgattcggtgcaggaaaaaaagccacatatcaatcccgattcccgttataaacgccgtaatcatccctgtaaattccggtctttgtctttttaacattgaattacagcaaattaacaggaaagcgatgatgatttcccagcttcccacggtaagccctgcatggacggataatcccacaataagcgcatcaaaaggcgatgttccaagatctgattgaatcgtgacagaaataccaaaggtcaagatcatgattcctaaaacataaaaaacatatttcactttatcgtcctcattttcttattttatgttgcaaatacaacaaaaatacggtatgtttactatacggtattttcattgcaaatacaacaaaaaaaaccagctgatatgataaatgaagaaaggagctgtatgaccatgagtattcaattaaaaaagtgcagccttaacgatataacagagcttcgggagataagcattgaaacattcaatgatacatttaaggatcaaaattcacctgaaaatatgaaagcttatttggaaaatgcattccgctctgaacagctgaaaaaggaattatccaatccgtcttctcaattttattttatttattatcatgatgaccttgcggggtatgtaaaagtcaacatgaacgaagcacagtcagaaaaaatgggggaagattctcttgagattgagagaatttatataagaaaaagccatcagaaacacgggcttggcaaatatctgctgaatgaagctgtgaaaatcgcaacagcacacaataaaaagaaaatctggctgggcgtatgggaaaaaaacgaaaatgcaatcgccttttatcaaaaaatggggtttgtccaaaccggagaacactctttttatatgggggatgataaacaagtcgactttatcatgaccaaaaccctgtcgtaaaaggatacaaaaaacccggccaagctgccgggttttttctcttattttaattttcccgcacggatatcatcggtcattccttcgtacggcgcttctgaaatcagtgcttcgttattgattcccgcattgttgagatacgtaatatccgcaaactcgggaacgacatatttcggatacgtttcatatttctcacgtgactctttcatcacgtcaatgtaatcattttggtagcacaccgtgatttccggatgctcatgcacccatttcgggaagaaaataattccgtgcatccgtttttcattcggcataaagtttaaggaaacgtctgtgcctgtcggttcagtccatgacactttgtatacgccttctgtcagtttgacgatattcacttcctggtcgcgcacccagcggccgcccaccattccgctatgaatccgatagtcgatcgtatgatcatttttaatatagatttcatactcccagccgttttcatacgtgtaaatcatatggcttccgataaagttttccatgttgactcactctccatcttattattgaatttcataaatatctaaccgaatgtcatccggccatctgatcgcagccccgataaacagccggtcctgcagatgctgatatgcctcgctgcttgtttcaaacacaggcacagtgcggaagtaaacatactcgggatcaatgatgcggttcactgaatcattgatgacttttttaaagaaggttcattcaaggacatatcacctcccgagacattatgtttatttaaacatgtaactatttacacgttcaattgtaacgctgttaaaatggactgtcaaataatgagctgcctctgataaagtttacccggaaaaagaggtgttcaacaaaaaagacaagggcggcacatgccgcaacccttgtctttttcattaagctcatctataaaaacgcagacgagcgtcttcttagtaatcacaatctttatctctgcattctttctttcttacagcgcctattgagtgccccatgatcttgtcatttgccttatcgtaaataccatcgaatttattcgatgtatcaccgttgtaatagccaaatacctctatcccgcccattggatctatctcgtatttatctttaaatgtaacgttatgtatgccttcataattcgctttgataaatttttccattcgttcttgagcaatctttatctcttcagcctgagcatttttatcattcatacttttcattataaaacctccggctgctattaagataatgaacataataatatattttttcacagaaacatccgtcccatcagttatgatgaagctcgcggactagaaaaatggtggtgacatccggtgcatttaggcatcttaagatttttcttccgcatccacagaggagctccctattttgtcacctacaggatcatataagccgtcaaattctttagttttatcaccgtttagatacccctcaactgtaattccgccggttggatcaataaaataatcatcataagaaattttatctatacccttgtactcgctacgcaagtattcggtcattttacttttggctttttcgaaaagagcattttcttcctttttgacatcatattgatgcttcataatcagccctccaacagttataattaacactagtacaataataaggtattttttcaaaaaaaatcatcctttccttaccctattttacatgacaagaaaggtgctgtatatcttgagcaagaaaatcaggacttcaaacctgacagatgaaacatattacaggatgagtcaacgtgcttataactatgactatcttaaaaggaaattaaagaagaacgattatatacgtattaattcttccatttcaaaacctacttactggtacgtcgatcaaataaaatcagacgataatacaggacttgatgcggttgtattagtacaagcagtgaagaataacggaaaatggataaaatcaaaaaaccccgaaaacgtggtcgtcgcctttgcgggaaccgatatcggaaaagacccgatcaatgacggcgtaaaagcggacggcggcaatattgttttcggaaatgatccgaaaaaagaagtacattatattgtaaaaaaagacgcaaaggatacctcgaaaacgctcggagcctatcacggaacgccctctcaagacgccatgctcacaaccggaaagtataagctgatgacgaaaacttcgcaaatcgatcaagccgatcagctggtacgcagcgtaaagaaaaagtatgccggaacgtcaacgattatttcaacaaccggccattcactcggcggcgctgaggccgaatacagcgcagtgaataatgatgtgtatgccgtcgcgtttaacagcccttccgtcgtaaaactgcacgatgaagaaacacagaaagaaatcaacagcggcatatacgatccatacatccggtcaattatcaatccggacgacatggtcggggcgggttattggaacgaatatgaccgccacaacgggacaacgatttatacgaaaaacccctcgctctcacagttcagccgaaagcagcggcttgatgggaaattgagcgagcagatcggaaaaaatctcgcttatttcttcactaccgtcattctgagaaatccggatacacacggcttaaacgaagcgaatttcatatttgacagaaacggaactatcgcaaatccgaacggagatgaattagtctttgacaaaaacctcggcgctcttctgccggccggtgcgatcggaagcggagacgcgataaaagtaacgccgaaaaacgcaaagaagctggctgaaaaggtgcaggctatgactgaggatttgcggacgatgaaaaaagaagcgcaaaacgcctatcaagaacacgatgaaaaaatcgccgagctgaaaacggaattttacggccaagtcggacacggcttgtatgatcagcttcaagcacaggacgtgaccaataccattgaagatattgcgctatcttacgataaaggcccgattttttatgacactcaggctgagcaggcgtttattgattctttgcaggcagcgatcacagaccttgaagagatcggcggattcttacataaaatagcagacgaatttcaggaaaaagaccagatgctcgcaaactggttaagatgatagaggtggatacataatgccgacattagacgaacttttagaacacaaggacgatccaatgaagaaaatgctgcagcggcagatgctgaaaacagggatgacgcaggcagcggggacaaaattggagacagtgcgccgaacgctgaaaccgacattcgaaatggatacgttgaaagatgaattatatgaagtgtattcagcactattgaacagctttgaaggcaaggcgcaaaaagctctcgcgcagcggatcagtgaaagtgcgcggctgattgccggcaccgaacataacagagacacattcgttaacagtttcaaaacaagataaaataaaaaaacctcacagatttaacatctgcgaggtttttcctatcgtcttaactgagacgcgctcggagggattcgaacccccgacagacgtggtaccggaaaccaccgctctatccaactgagctacgagcgcacgttttttcaatcagatacctttatattataataaagaaacgcacagaaagcaactcttttttgataatgcaacaacaggattatgcagcttcctcatgcagcataatcctgcatcgtataacggcattgattttcacaaaaaaaccatttcaggcggactgcccccggatcggtacatttccagccacttcagaaaaagcacatttcagctttttttccaaatgtcctttaacgtccaataggtgaattcctcaacctttacggcgcctttctcagaaaacagctcaatccccaatctgccttcattcggatagatacggcttgtcatcgttgtttctccatgattggcgaatacttcaatcgaggatctgtcaataaagatacgcagcgccagcttgccgtttgtatccgtctgcacccttctcacaccgtctttcgctttccccatcttggtgcaatcaagtgtcagctttttatccgtcagattgtatgtcagcacaagttcttcttcgtcaaggccgcgaatcttaaaacctgccgtttcggcatcagaatcgtttatatcaaacacgactcggacttcaagcaggtcttcggacgtctttgccaagtaactccctgaaaccgatcgtccggcacattcccgatattccattttccgcagctgcttggtttcttccacgggattcatcaaaagtttatgatcatcacgcaaagtcagttctcgcggcaaagtcagtgcaccgcaccatccgtccgcttttgtcggcatctcagattcccacatatccatccagccgatggcaattctgcgtcctttatcatctaataatgtttgcacggcgtaaaagtcatggccgtgatccagttctttaaaagcgccgtgtgtaaatttgtttgtttcatcatgatagtcaccgattaaataaccggtttgatgtaaattttgataggaatcaccgtccgcctcgatcccctggggcgaaatcagcaggacatgtttgccgcctaattcaaagaaatcaggacattcccacatatagccgagattaccgtcactttgggcgagaacccccgcgtattcccaatcacgcaaatcaggtgaacggtataaaacgacccgtccgacgttttcttttgaggagttgccgatgaccatataccaaacatcgcgatgcttccatactttcggatcgcggaaatgacgggcgctgtcttccggcggttccgcaataacagggttttcctgaagcttttcaaacacgattccatcttggctgacagcgatattttgagtttgatagaataggtctttctcttgatcaattatattatgtcctgtatagatgagggccaatcttccatgatcatcgaccgcgcttcccgaaaaacagccgctttggtcgaattcatcccccggagctaaggcaaccggcaggtgctcccaatgaatgagatctttactttttacatgtccccaatgcatcggcccccaatgctcatcatacggatgatgctgaaaaaagacgtggtattctcctttaaactgaataagcccgttcgggtcattgatccaattcgcccggggcataatatggtaccccaatcgatatctttgtttcactttaccctcggcttccttcaaagcttcttccgcctgctgaattctatccatttgtaacatcctctctatccgattttttgcagacgctggacacgcctgctgttttgtttcgggcccaataaagtaaatatggagatgacggtaaaaccgaagacgatgattcccatgatgagataggtttgacggaaccccgcactgtcatataatcctcccgcaagcagcgacagaatcgacgcgcctgcctgagatgcgaattgaaaaccgacgagataaaggacggacgacagacgcgtatcaaaattggcagccaaatatttaaaaacggcgatcagcataatcggcaattccagtgcgtggatgagtttcattgatgaaatgcctacaggctcaactgcaattccggacccgacgatgcggaaagccattaaaaatcccgctaaaatcaaactgtttttcgccccgaacttattgacgataaaaggggcaagaaacatcataccggcctccaaaaacacttggaatgaattcagatagccgaatacttggttacccgtcgacactgaaggaaacaaagacgcatagtagatcgggaactgctgatcatatacaccgtaaatgcaagtcaccccgataatgtacatcataaaaaaccagaaatctcttagtaaaaagagccgccccacatcttttaaccggaccgaatccgctctgtttttctcatgatcggtcatttctatttttacagacatgatgatggccgttaatatgacggctgaaacagacgcgatccagaagttgatattgggattgatattgaaaagctgacctgcaaaaaatgcagccgccgcccagcccagcgagccccacattctagattttccatactcgaaatcatatttacggctgaccttttcaatgtacgtttcaatcgcgcctatccccgccaaaaaagcggctcccaaatataagcctccgacaacggcgccaagaaagacgttgtattgtaaaagcggtccatagacgaagatataaaacggacccgtgaatatgagaagacagctgatcataaacaatatctttttcttcagccccaatttgtcagagataaaaccgtaaagaggctgcatgcacagggcaaatacggcgtttacagaaaagataatgcctgtcgctgatccgtttaaattgatttcctgccctaaccaaatcgcaaataaagaatagctggaagaccaagtaaaaaagaaaaagaagaaataagcactcagtttccaatacagactttttgagcttttcatttgcaccgctcctttaataggaccttttaatagccgttttagagccgcatacttccttcttcattttcatcacatacatgcgagctccgagtaagcgcttacctaacatcgctgcttgattctttcacttcattgccgtcagccatctctccatacccgtcacttcccctcactccataaataaagcgctttcaaaaagaattgtatgtcaaccggtttcatatgtcaatcggttgacataaaattttctgattatttcaatcaaatcaaacacaccctctttatatgaaaacagaaacatggaatgtccttgcacatgtcagcctgattctctaaaataagtgcgtgacggaaattgtaagccatttcagtaagcaggagggcacgggaatgaagcctaacattcatgatgttgcgaaaatagcgggagtttcatctacaaccgtttcgcgggtattaaataaccgcggctatatcagcgaaaaaacaaaagaaaaagtgtacaaggcgatggaagaaatcaattactttccaaacgatctggcccgctctttattccgaaaacgaaccaatttaatagggcttatcatcccaaactccagcaatccgtttttcggcgaactcgcctttcatattgaaagcatttgtacgtccatgggctacaaactgctgctttgcaacagtttacatcgaaaggataaggaagaaaaatatttggagatgctgataagaaaccaagtggacggcgtgatcgccgtgacttacaaccggggaattctcaatgatcacaagcaaaatctgccgattgtcgccattgatcattacttatcggacacgattcccgtcgtcggctcagacaactatgacggcggaaaaaaggcggcagaactgctgattgaaaaagggtgccggcacatcgtccatatcaacggcccgattgaactcgaaacaccggcaaacctcagaagaaaagcatacgaagacgtcatgcatgaacacggacggaagcctattacatatgaagtacccttttatcagcattaccatgacattatttcaacattattcgatgaacagcctgacaccgacggaatttttgccagcgatgatatcatggcggctgcagtgatgaccgaggccaaaaaacggggaatggacatcccgaatcaattaaaagtgatcggttatgacggcactgaaaccgttcaatcgattctgccggacttggcaaccatccagcagccgattgaattgatttctaaaacagccatcgagattttagcaaaagaaattgaaggcgaatttgatgatttgccgctggaaacgtatttgccggtacggcttttggaagggcggacaacgtagtcagaccgttcagccgtacgtagcgacgcgattgcggtctattttgagcgctccggccatatcattttctcaaggctccggcattgatcatcctcatttccactttgctgtttgaactttttgttttatgggaaaaatggtgttagaagaaaaggttggcattttggtcagcgttttgtttgacctttattgaccaaaaatgtatcatgtaaatacatacttacctaaaaggtgaaggaggagcattatgaatttaatacctacagtcattgaacaaacgaaccgcggagaaagagcttatgacatttactcccgtcttttgaaggaccgtattatcatgcttggatctgcgattgatgacaacgttgcgaactccatcgtgtcacagcttttattccttgaagcggaagaccctgaaaaagatatttccatttacattaacagccctggcggatcaatcactgccggcatggcaatctatgatacaatgcagttcattaaaccgaaagtatccacgatctgcatcggtatggccgcttctatgggagcatttttacttgcagccggagaaaaaggcaaacgttacgcgcttcctaacagtgaagttatgattcaccagccgcttggcggagcgcaagggcaggcgacagaaattgaaatcgcggcaaaacgcattctcttgcttcgcgacaaattaaacaaagtgcttgctgaacgtaccggccagccgcttgaagtcattgagcgcgatacagaccgcgacaacttcaaatcagctgatgaagccttagaatacggcttaatcgataaagtgctgacacgcaatacagaagaccagaagtaatgccaaaaaacctgcaagagctgatgtctcttgcaggttttttatgctttattcccattcaaaaaagtaatgaatgctttgacgacagataattctaacgctgaagaatcatacataagccaagtatcgcgtatcacaggctcgttatttttataggatagcgccaatgtgtataattcatcagaaggctgaagacagatttccggcacaacagaataaccgagaccgtttttcaccatctctttacaggtttcctgcctgtctacctccatcgcaatgaaaggcggttcagtaaattggttattccaccatttttgaatcaaacttttcaaagaagcatcagtttgataataaatcatcggcaatttgggaaggtcctcactgttgatttcagtttttgaaataaggtacagccgctcttcatttagcagttgtttttccccttgccaatcataatttcccctcataatcccaaggtgtacccccgaatgatgaagcagatccatcaccttcgcactccatcccgtattgacgtggaattgaacagacggatactgatcagaaaaccgttttagaatcgccgggagcttatactgagcaaaattgcttgagactcctaatctgagaaccccgctgacttcatggctcatattgagcatatcatccttcactcttctgaattcctgcagcatctctttcgaataatcaaccagatgttcaccttctgaagtgaactccatccctttttttcttttataaaaaaggcgcactccgaattgtgcttccaggtttttgagccgataacttaacgccggctgtgtcatatataatcgctctgccgccttcgtcatatttttttcttcgaataatgtaatgagcacaatccaatccttttcatccatatgaaatcccccaaaatatttttctgctataaaatttcctcctattataaaagttttttattcaactttataaaaattatatgttttacttataatccttatttatcatacgatattttccaaagggaccggtacctttttatccacacaaaatgatgtaaggatgagacagcatggaaaaagttcctgtaaccgtcatgagaggcggcaccagcaaaggcgtttttattcatcaaaaagacatgccagacgatacaaacctatggagcgattttcttttagacattatggggagccctgacgagagacaaattgacggtctcggcggcggccattctctcacaagcaaggcagccattattaagaaatccgccagaaaggatgcagatgttgagtatacgtttgctcaggtcagtttgactgaccattttacggacttcaaaggcaattgcggaaatatctcttctgccgtaggcccttatgctattgagaaagggctcgttcaagctgaagagccggttacaaaagtcagaatgttaaatacaaacactcaaaaagtgatcgtagcagaagttgaagtcagaaatggaacatttcattaccagggggactgctctatccccggggttccaggtacagcttctcctatttatctttcatttcaccaggctgaaggagcggtgaccggaaaactgtttccgaccggtcagcctattgatgttctcgatacaccgtatggaaatatctcggtctcgattattgattacgccaatccgcttgtctttgtaaaagcagaggacacggggcttaccggcttagaacttccggatgaatatactccggatatattggaaaagctcgaaatgatccgatcaattgcagccgagaaatgcagattcgctccgagacatgaggctgctgcaaaatcaccggccgtaccaaaactgactttaatctcgtctccagcggattatattgatacaaaagggataaagagacacgcagaagagatggatcttgtcattcgtatgatgtccatgcaaaaaccgcatcaagctttagccattacaggggcggtatgtacgactgccggcatgctattgcaggatacaatattatctgaattttcattctatggcagaacgattcgattgggacatccaagcggcattttagaaaccgaggcagatgctgatccggatggaacaacgattaaagtagtacgcacagcaagaaaaatctctgaaggctatgtgtttacaaagcaaagttacaacctgaatacgctgaatcacattggttaataccagtcttcagacaagtcaaagataaacggaggaatgcgagatgatcaatgtaaatgcgtctaatcgattaaacagactgcctttttcaagggcccatcaagcagtgctcgttatcctttcattcgcttacttttttgattttatcgatttaaatacgttttcatatgcggcgccttcacttttaaaggaatggaacgtttcgactcataccatcgcttttattacgtctgtctcctatttcggaatgtttatcggtgcctctgccggaggatggttttcagaccgtttcggaaggaaaaaaggtttaattctggttgtcacttttttctctttcttctccctcctctcttctctggcttggaacccagaaatactcggtgtttttagatttcttacgagtttgggtatcggcgccacaacgattgtggcaagtacgtatatcagcgaatttttcccatccgcaactaagggtaaataccaggcaatctgtattacaatcggcatatgcggaattcctgcagccggctgggtggctaaattggtcgtgccgtccgcctcttacggctggcggtttatctttctattcggcgcggtcggtattttttttccgctaatcgccagaaaactggaagaatcaccgaaatggctggacacgaaaggaaaaagcgaacaagcacaccgcattctgcttgaactggaggcaaaagcagaaaaagaaaagggtgaactgcctgaaccagctccggctctacgaagcagacaaaccgctgtaaaatccgttccatatcggacgttatttcaaaagcctttggcaggaagaacttttgttttaatgacgatgtgggcagcttccacgattgcaattcaaggctttggcacgtgggttcccacccttttggtaaaagaaggcgtatcaatggatgagtctatcgtatacgtcactctgggaacgatcggtgccccgctgggcgctctcattgcctcgcaaatctctgaccgtgtggatcgaaagtgggccatttctgttttatcgttaattattatggcgcttggattcttttacggcatcaatcctttgccgatggtcattgtcatatgcggatttctcatgcatatgtttgagcgtacgttcagttcgatcgcatatgcctatacgccggaattatatccggttgaagccagggcgtctggaaatggtctcacttacggcgtaggacgtcttgcaaatgtagccggtccctttgtcgtcagtttcctgtattcaggctacggatttttaagtgttttcttgttctttacaggctgctggtttctttgtgcactgacagtcggtatatttggaatcggttcaaaaaaacaaaagatgcagcaggatgatttcatatcggaggaaacattcgtgcaacaaaagttgtaaacgcatacagtctgcaaaccgcaaaacatccatctcctctgaggaaatggatgttcttctttcaaccccaacagcattctctttctcatcttattctcatacatatgtcttatcatgaagaaaggtgtgatacgcatgagaaagagaaaacgatttccagaaagaaaaggtattctataggcggagaattttccatcagaatggatcagatgcagccgccgaaacataatttcagacctccaccttacaattcccgccatttcttatctaaaatcgggtatgtataccgattcatctgctcaatcagctcatccggccgggaggaactgtgtatcagttttaaatgagactcattcgaaaatccttcctgaatgctgtacttgaccatcttcatcatcggctcaaaatacccgttcacattgtacagtccgatcggtttttgatgaatgccgatttgcgcccagcatagcacttcaaacaactcttcatatgttccgaagccgccgggcatggcaatgtacccatcggcaagttcactcattttcgctttccgctcatgcataccgctgacttcaatcagttccgtaagattctgatgaacaatctctccgctgaacagcccgctcggcatgacgccgacagcttttccgccgcctgccattaacgcatcggcgacggttcccatcagaccgacccgtgaaccgccgtaaacaaggccgattccctgctccgccatatattcacccagttcggccgctttgcgtttgtactcttcatttacccccgggtttgaccccgcaaatacacaaatggttttcattttttcatctccgcatctatatatgtacatcaataaatcaaaacacactatatattgtcccatctctatatgataatatcaataagaatcatacaggacataaggagtgtttcacatgcagatggctgaagcagaacaatggacgaaagatttttatgaaaaacgaggatggacggcgtacgggccatttatcagaatcggttttttaatggaagaggcgggtgagctcgcccgagcggtaagagcatatgaaatcggcagagaccggccggatgaaaaagacgcgacccaggctgaacgcaggcaggagctgattgaagaaatgggtgacgtcctcggaaatctggccatccttgccgataagtacggcatcacgttagaagatgcgatgaaagcccatcaggaaaaactgatcaagcgctttgaaaccgaataaaaacacggcctgtccgctttttcatggacaggccgtatctgaatttatcccgttatctcgtcctgatgctcaaagaaatgctgtttcccgattttatgaaacagccccgtcttccggatcagctctctcggctgtgattgcaatccgacgatcatcaatctcccgttatgccgtttgatccggttcatcacattccccagcaccgcttctgcggaggtatccatgtaatgtacattattcatcagcagaataagcgtcttcggcttttcctgaagcctctccagcagcgatgtttccagtgaatcaattgaaccgaaaaacagcggcccttcaatggaatatgtgctgacggacgaatcatttttaaccgatttgacagcggcatgcggtgttttgatacgtgttgattcgctcattttcctgataaagaaaacaaaagcgagcacgagaccggcagaaacgccgatgattaaatcaaacagaaccgtcagcaaaaaggttgccgccagtacgaatgaatcagtgtttttcagccgcatcatattggcgacttccctccgctcactcatgttccaagccacaaccatcaataccggcgccatgcttgccagcggtacgtgaacggcaagcggggcgaagacgagcaggacgaggaggacggtgactccgtggacaacaccggaaatcggagaaactgcgccgtttttaatatttgttgcggtccgcgcaatcgctcccgttgccggtataccgccgaaaagcggcgctgccatattggcgatgccctgcccgacaagctccctattgctgtcatgccgtgatcctttcatattgtccgcgaccatcgccgataatatggactcaagtccgccgagaagcgcaatgatcagagccgacggaaacatcatgatcatgttatcgattgagaaatcaggaagctggaaagccggaagctgccgcgggatttccccgtaagcagaaccgattgtcgccattttgtcaggaaaaaacacgaccgccgcggctgtagagacaagcagcgccacaagcgcgcccggaatcttcggcatcagcctggctgataacagcaaaatggccaaagcaattcccgcgatgaggatgctgtataaattaagggttccgatcttcttgccgatttcggcaatgttgaggataaagctttcatgcttttggatatcgcgcagaccgagaaaatgggcaatctgctccgagaaaatcagcaccgcgattccggccgtaaatccgacgatcaccggcttcggcacgaatttcataatctttccgagcttaaatacgccaaacaggacgagcatgacgcctgccataaaaccggctacaagtaaattctcaaaaccatactgcatcacaatggcaaataaaatgggaacaaacgcccccgtaggcccgccgatctgatatttagagccgcccaacagcgaaatcagaattccggccacaataacggtgtaaagcccgtattccggaccgacccccgaggcgatggcaaaggccattcccagtggaatcgctacaattcccaccacaattcccgcgattaggtctttctgaaatttctgcaaattgtatccctgatatctgccggtaaattgcatcgtcagctgcatcctcctttgactgtttcataaccgtcaacgactacatccagcgtccccgtccccggatcgatcaccagcccgtgcaccggcacctcttcaggcaagagcggatgatgcctgaccatattcacgctgtgggccacgctttcttcgacgctgtgaaaaccggtcagccatgtttccaaatcgactcccgcatgctgcagaaggctgagacatttgtcctccacgccgcgctctttcgctttatttaatatggaagccgcatttaatcccgacattccgcactcgcggtgacctatgatgcagacttcctctgcctgcagttcataaacggcaaccaaaatgctccgcatgacacttccaaatgggtgagaaacaatggctcccgcgttttttatgattttggcatcgccgtttctgagtcccatcgcctgcggcagaagctccgtcagccttgtatccatacaggatacgatgacaagcttttttttcgggaattttgtcgtttggtaaggttcatatttcctttcttggacaaactgctggttgtgctccaaaatgcttgataaagaaaccatttttctattcatctcccatccgattgtattgcaagccttcttacccagcttacagtaaggaattatagcacagaaaaaggcctcaaaagcgctttcaaaaaaagacacgataatttgactgtaaattcagattatgttcatttatatctttcaaaaataataaaatttatctttacacaaacctataaagcttttgaaaacagcggttccgctcattttgccttcagaaatataggcggattctgttattgtttggagaaatcaagcatgtacatttctttttctttcattttaagttcaaaagaaccagaaatttatcgtaatgcgtttgaatatttctcacgttaccgcttctcttatataataaaatagagaagaaagacaaaggaggagaagcccgttgaaaccctatgtattcatcgcgaaaccgataccgccggaagtcgaacaaatgataggcgagcattgccggtatgacatctggaaagaagataccattccaaaagaggaactgtacgaaaaaatgaaagatgctgaagggctgctgacatccggaacggcgattgacagtgatttactggatcacgcgccgaagctgaaggtcgtcagcaataattctgtcggctatgataattttaatattgaagaaatgaaaagacgcggggttgtcggcacgcatacgccgtacaccttagatgacactgtcgctgatctggctttttcattaatcctgtcttccgccagacgggttgccgaattggatcgattcgtccgcgccggcaaatggggaaccgttgaggaagaatctcttttcggtatggatgtccaccatcagacattaggaattatcggcatgggcagaatcggtgaacaagctgccaaacgggcaaaattcggcttcgatatggacgtgctgtattataaccgcagcagaaaaccggacgctgagaaggaactcggggttacatatgccgacttagatacactgctgaaaacatcagactttgtgcttttaattacgccgcttactgacgaaacgtatcatatgatgggagagcgggaatttaaatatatgaaagatacggcatgtttcgtcaatatttcccggggaaagacggttgatgagaaagcgctcatccgcgcattgcaggagggctggataaaaggcgccggtttagatgtgtttgaaaaagagccgatcgccgaagacaatccgctcctgcagctggaaaacgtcacattgcttccgcatatcgggtcagcaacggcaaaaatccgtttgaatatgttcaagcaggccgcacaaaacatgatagacgccgtatacggaaaaacgccgaaaaacctcacgaaggaatttcaatgagatgaaaaaccccggccgtttcagccggggtttatttttcgctagatcaaaaggactatttttaaattctttctattcctttctctcgatgctgatacaatgaaaaggaatcagcttcacatgataaaaatgggaggtattgctttgaaaaaacgattatcgtggatttccgtttgtttgctggtgctgttctccgcggcggggatgctgttttccacggctgccaagacggatacatcttctcacaaggcgcacactgaagcacaggttatcaacacgtttgacggggttgcggattatcttcagacttatcataggcttcctgataattacattaaaaagtcagaagcgcaggccctcggctgggtggcatcaaaggggaatcttgcagacgtcgctccggggaaaagcatcggcggagacatcttctcaaacagggaaggcaaactccctgccaaaagcggacggacgtggcgtgaagcggatattaactatacatcaggcttcagaaattcagaccggattctttactcaagcgactggctgatttataagacgacagatcattataaaacctttacaaaaatgagataaacacatacaaaaaacggcttccctgcggaggccgttttttttgcagagaacctgcgagcttcatataaaatgagcagtaaatttttcttcaaactctgatcggtctattctgctgttttccgccgtgccatcgtgtttttttattgttatattgcgttcagacagaaccatgtgcccttccggtgtccgcttagaagcaagcaggcgtttgttgaaaggagagcgttcatgttcaaagattgtttgtttcatagacttgaggtccttttcatcgatttcttcaagggaaaatgcgtaacctgtctgccagccgtcccctttgttcatttcaagcaggtatgtcccgaattccgtctcttctatcctcacgcggaacgctccggccgctgataccgtctcgtctcccgacatcggcacaggctgcatggcgagattgaggccgaagcctgcatcagcgatgtactcattccccccggcggaaagaagtacggccgcatgtgtgccgggcagcgcccagccgtttttccagaccgttccgcggatcaatttgacatcaaatccggcatctttcaggatgaaataaagcagtccgttcaagtcataacaaaggccgccatgaggttccttcaccatgtgccgccacagtccttctttcgtgacgtcatattcttttttggacaaaaccgcgcgattttcaaacggaaaccgatatgcgagcgcctttaaaaactccggcaggttgctgaaatcgagggaatccttttcccagcctatcgtttgataacaatctttcagaaactcattcatcgttccgtcccccttacaaagtgtttacacttcttcctgcacataagcggacaacttttccagcgcttccttttcatcgtcgccttcagcgatcagagtgacttccgtccccgtgctgaccgccagactcattaatcccataatgcttttggcattcactttcttgccgtttttctcaagaaacacatctgatgcaaaacgatttgcctcctgtacaaacaatgcagcggggcgcgcctgtaatcccgtctttaaacgcacttccactttctcctgaaccataagatctccccttttctgtacggttatttcaaagtgatgctttgtcctgtacgcagctgttctgcgatttcatcgagctttctcagcctgtgattgatgccggatttgctgattttcccgcttgcaaccatttcccccagttctttcagcgtgacctcctgataatcaatccgcagctgcgcaatttcgcgaagcttttccggcagcgcttcaagaccgatccgttcatcaatgtatttaatattttccacctgtctgagcgaagcaccgatggttttgtttaagtttgctgtttcacaattgacgaggcggttcactgagtttctcatatctctgacaatccgcacatcttcaaaacgcagcagtgaattgtgagcgccgatgacattcagaaattcagtgattttttccgcctcttttaaatacgtaatatagccttttttccgttcaagcgttttgctgttcagatgaaattcattcagcagcgcgcataatgaatcgttatgttccttataaagcgagaagatttccaagtggtacgacgatgtttcgggattattcacagatccccccgccaaaaacgcccctctcatataagaacgtttgcagcagcgtttcgccaccagttcctcagaaatattccgttcaaatacaaagttctctccgaggattttcaattcctctaaaatcagctttgcattttcagaaaagcgcacaatataaacattgttttttttcagccgcattttttttctgactaacagttcgaccgatacatcatattgtttcttcagcaatgtataaatgcggcgggcaatcgccgcattttcggtttgaacgtcaagcacgagatggcggtttgaaaatgacagtgaaccgttcatccgaatcagcgcggacagctccgccttggcgcagcagtccttcacttccaggttcgtcagttctttttttgtttccgatgcaaatgacatattagccacctcatttcaaaaggcctctagtcccttaataaatcgacaagaagagaagccactttatgtgtatcgtgacggattacgccatttttatacgtgataatctgatccctgatgacctcaagccccatggatttcagcttttcaacattgaagtcgacgggccgggccagctctttcgcatatttgcttttgatttcgtcagggatctcctcgttgttgattaagatcgtgtcgataaacggctgctccatatgatcgttcagcgccttgacatggtcggccgcactgtattgcagcgtctctccgggctgcgtcatgacgttgcatatatatacttttttggccgcagccttgacgacttcctctccgattttcggtacgagcagattcggaagaatgcttgtgtacaggcttcccggaccgataatgattaaatcggcctgacggatgacgtcaatcgtttccgggagcggatcaattttttcaggcgtaagaaacacccgtttaatccgctggccgtaagaagggattgtcgattctccggagacgacctgcccgtcctccatttcagcgtgaagaacgacactggtgttggcagccggcagcactctgccgcggacattcagcaccttgctcatttcggtgacagcgtgaaagaaatcaccggttatatttgtcatcgctgccaaaatcaaattgccgagcgaatgtccggttaagtcgcttcctttgttgaaacggtgctgaaacagattttcaacgagcggctcaacatctgacaaagcggccagtacgttacggatgtcacccggcggcggaatttgaagttcatcccgcagacggcctgaacttccgccgtcatcagcaactgtcacaatcgccgtaatatcaacgggcttatgctttaacccccgaagcagcacggacagacccgttccgccgccgaagattgcgattttcggcttcttattcatttccggcttctcttttcaatgtcccggtgagtgacatgagtatagaaatcttttttaaaatagtcagccaaatactcagcgagcgtgacggagcggtgctggccgcccgtacagccgatcgcgatgacaagctggcttttaccttcccgcttataagacggaagcataaagccgagcagatcaacaagcttttcaataaacttttgtgtttcgttccacttcatcacataggatgacacttcctcatctttccccgtaagcggcctcatgctttcaatgtagaacggattcggcagaaaccttacatcaaacacgaggtcggcatctatcggaagcccgtatttgaaaccgaatgacatcacgttcactgtaaatgtttcaccttggttcgtggcgaaatgcgccacgattttttcacgcagatcacgcggtttcatatccgatgtgtcatagatcagctgagagcgccctttcaattcttcaagcagctggcgttccagcgcgattccttcgagaggaagcccggtagcggccagcgggtgagaacgcctcgtttctttgtatctcgtcacaaggatggaatccttagcgtctaaaaagagaatgcgcggtgtaatccacggattttccgccatttcgtccagcgcctcaatcagcctgtcaaaaaattcacgtccccgcagatccatgacaagcgcgaccttgctcatttttgaacttgattctttcatcagctccaaaaatttcggcagcaaggaaggcggcagattgtcgacgcaaaaatagccgagatcctcaaagctttgaatggcgacggttttccccgctccagacattcccgtaatgatgacgagctgaatatcatggttttcattcatactcatctttctcccccctgcggtctttcttttatttgataagctgcggatctaaacgatagctgagcagctcgaagtccggcgtatacgtaaaggtgccgtgcaaaagcccttggcccttgatcataaaatcaaggatatgcccgtctccgggggccatcggaaggctgtggatatcttttacgtcatgccacttcagaacgccttcctctgattcagcgacattccgccccgtgtacgagtcggcgacgaaagtaaacatcatccactctgacacgatttgttcctgttccttaataataaaggtaaacacgccttttaactgcggatttagtatataaatgcccgtctcttctctgtactccctgatgacggaatctctgacggactcgccgctttccatcttcccgccgggcgcgacccaccagccccgtctcggcttttggagaaggagaacctgatcatctgtctgcagcacacaatttgtcactctttgcacaagtacgtcacctaaccttctcaacaaatcatcgtctcttcattataccgtttcggcatgtctctcacaatgcagagacaccgacatccttttcttttatttgacagaaaacagaaaatcgcaaaaaaagggcacggatactggaatccgtgccaaagtgtattcattaaaaagggggtcaattactacattcatcttaagacatcagtgtttcacccgtgttacagcgtaattaaaacacagtaacgattcaaaaactgaacattacagtgattatttaacggttttgagcgtttcctcaagctcttccacataatgctgaacgctttgagccgcaatacttccgtcgcctgtcgccgttacgatctggcggagcgttttttcacggatgtctcccgcggcgaaaatgcctggaacttttgtttccatttgagcgtttgtttcaatgtagccttcttcatttgtgatgcccaagttttcgaacggtttagaaagcggaagcataccgatataaataaagacgccgtcagctttgaattcttcctcttctcccgtcacggtatccacaagagtaagtttaccgacttttccgttttcctcatggatttcttttacggttttgttccatttgaagtcaattttctcattgtcaaaggcacgcgcctgaagaatgctttgcgcccgcaatttgtcacgtctgtgaacgatggtgacttttgaagcgaagcgtgtcagatagacgccttcttcaacggcggagtctccgccgccgacaacgacaagctctttatttttaaagaatgcgccgtcacaaaccgcgcagtacgatacgccgcggccgcccagttctttttcgccgggaacgccgatctttttgtattccgctccggcagaaatgacgatggctcgcgctttatattcttttgaaccggctttgaccgttttatattctttgccgtcaacgatttctttaatatcgccgtacgcatattccgcaccgaattttttcgcatgttcaaacattttattagaaagttcagggccgagaatgctttcaaaacccggatagttttcaacatcctccgtgttggccatctggccgcccggaattcctctttcgatcattaatgtggataagttcgctcgtgatgtgtaaacagcagcggtcatccccgccggacccgcgccgataatgatcacatcataaattttttcttctgacaccatgattcactccttttcgaaatggggcgcaccctatatgactaagaatccccatcaatcgtattccttacccatatcctattaaatctgagggcaattcgctatttttttgctcatttttctaagaaaccgtgattaggcagctcctgagcgggtatacaaataaagaaagagccttccgggatagaaggcccttgtcttattcattattgcacgacacgtcttacattgccgttgaatgctttcttccagtaagggttgctcatagaatcaatggatacaccgtgtgatgtattatcgttcaggaacgttccattacctaagtagatgccgacgtggccgtttgttttatacgtattgaagaatactaagtctccgcgtttcatgtcagacgcgcttactgctttacctcttccgattaatgtatctgtgtttgtgccgcttgcaggtccgaggttaacgcctgcgttagcataagcccagcgtacgaatgaagagcagtcaaaaatacggttgttaatatcagattgagtgcgtccgccgccgaatttgtacggggattgacccacaaggcttgaacctacgctgatcgcgccttcaataccgcctgaatttgaaataacagatccgccgtcagaatcatctgaaccgccgctgttatgagatgatccgcctgaagtgctcttcggtttgcttgagctgtcagatgaatcagatgatgttgaaacagccgcttttttcacagttttaaccgccggtgccggctggctgtcatctttttggttttggtcttcagaagctttttgcgcttcttcctgttttttgatcagggcagccgctgcagcctgctcagctttaatgcgcttctgttctttttcagtatcagctttttcgtttgcaagctttgatgcttcttttttcagatcagagatagcggaagccgcttttttctgaccgtttttcgcttcgtcgaaaagcttgtctttctgatcaagctgtttgttcaggtctttttgcatagactcaagtttcgcaagatcatcttgaacttttttcagcttcacgttaagttcagcttctgcgtcttcgagtttcgctttatcctgctcctgctgtttgatcagctctttatccgcgtcaacgatagaagataccgcagtcgcacgggaaatgaagtctccgaagcttgtcgcccctaaaagaacatctatgtatccttgagaaccgccgttttcctgtaaagaacgaacgcgttttttcaggatttcattgcgtttttcaatacgcgcttctgtttctttgatttcttttttcaaatcagcgatctgctttttcgttttttcgttttcagcttttttatcttcgattttattgcttgtatccaacgctttagcgttaatgtctttcagttctttttcaatcttagcctgcttgtcctgaagcttagacaattctctttcttttgcttcaaggcttgaagccacctcagattgcttgctttcgatttttgcttttttgctgtctaatgtttccgccgatgcagtttttgtaaacgggatcaaaaaactgcttgtcccgatgacggaagccaaaccaagtgttaataaactctttttcactttttctttcctcccttttactttaaacctgttctcatttggaattctattatgaacatcaaagttacgctccctcacatacccgtgaggctgatgatttttatgtatgaatctttaaatcttttaaattggtatagattatacagcacatgtaaaataaactaatctcttatgtacgagactcattataccatcatgtttcgacaatttttattacagttatatttcaatgtgattgcaaatctcatattttgcaaaataaacggtgattacggcctgatttcgattcgaaaagcaaaaaaatacgtatgatacctctttattcggcggtaaagttctgttttgcccctttctgataaaaaaagaaccgactctttatatagaaagaatcggttttattctaatatatcgtctatttgtctgatgtatttcgaaagtgttgccggcgttataccgtaaacggcggccgtttcttttttcgtcgttttttcgccgtttgcttctttccatacatatgcgatggctgcggcccatgcccgctcattctgtacggcagcggcggcgcggatgtgctgaatgacgtgaaaaacccagcagctcatgacgtcagtttttaaactgtcggcttccgctttctccagcagcttgaccgtccgatacgtgaacagcgcatcaccggagacgcctgaagcgcctttttcaccggaaagcagcagtttgacgaaatcttgttcaaacggtgaaacggcgcgttttgccgtcagaactttttcaagctggttccgctctccttcagcgctgctgatataataggcggcaagccgctgttcaagtgaagcaggcagcggttcctgccgctccgcccaaggcgcgggccggtctgattcgggaaattcggcttcggcctttttccaaatggtttccgcaaattctgtgcggcctgtcccgtaggctgaggcggccagccagtaataaaacgtttcgtcgccttcgaatccgcttttgtaaagagaacggagccatttataaccgagatcatgtctgccgacaagcgcaagcgtcgcccccagcttatagcgctgttcgaataaaatcggatacacattggcgagttttccgctcaattctccgactttttcatcttccctctcgtaatagcagaatacaaggaggttgcacaaggcatggagattgccttcatttttctcaagcacttcgaataccgtttgtttcgcttttgtgacattgcctgagtaaaagtaagcgagcgccaggttgttgtatgcagaccaaagctcggggtaatcggccgtaatctcttcaagcatgacaaccgcttcatgaagctggccgctctcaagaagcgtttttgcccgatcctgcctgatcagcagttcatcctggtcatagagcgattcgttttcacccgcttcgccgaaatccaatagctccatcagattttctatctcttcgctgaattcaccgtccggatcggcatctgaataagccgctgcttctttgtatgcttcctgaaagagtcccaaatgcgcgaaattattcgctttaaagtaatgacactcgggcatttcttctttcaggttcaccaaaataaagtcgaacagctcatttgactgctggtagtggcccatttcagaataaatgacggccagccgggacagcatttcggaatcattcggctcgaggtggacggcccgctgaatcagtttgctggcccgctttaaattccgctctttatatgcttttaagcctttatgaaaaaaatattgtccatcctgaagcagctggacaatttgcgcgtgctttttctgttcagaagtgtgttttcccacaaatatcctccgttttatacgtattaccgtcagtagtataccataaaacggtttcacctcaatagttcaaaagacaggatcggcttcgttttttactggctggttcgaccagattttagctgtttttttcacgaggctcggctggaagaatgacgcggaaaagggttccttcgccgcgcttgctctcaacctctatcgaacccccgtgcagctcggcgattttttgggcgatggacagaccgagcccgcttcctccttcgtttctcgccttgtccgctttataaaaccgttcaaatacacgctccgcctgttcaggctccattccgattccgtcgtcggcgatttcgacagccgccgctcccggcagatctgcaattttaacggaaatgcggccgccttcaccggtaaattttacggcattgtgaatcagattcatccatacttggctgagcagcgcttcatctccgtacacatacgactcctgtaaatcaatgagaaactcaatctgtttggcggaccactcaggctcacaagtcaatatggtgcgccgcagctgtttgtcaatgcggaacggttttttttgtatcggttcggtttggcgttcgagcgcagtgagcttcagcagattttcactgatttttgataatcgttctgtttctgtttcgatgatgtgtaagtagcgcccccgctcctcatatgataaatccggttttttcagaagatgcgcgtagccctttaatgaagtgagcggggtttggatttcatgggaaacgttcgaaataaattcttgtttcagtttttccatttcactcagttccgcggcgagtgtcgacagttcatcagccaatttcgtcacgggatggttccgctcaatcttctccattttccgggaagcggccgctgtgaagttgccgctcgacatttgcttgatcgtggcggtcagcgaatcccagatcgcatgatgtctttcacgtgctgactttgaaaaaataaacatcgttacaaacagcaggccgaaaacaagccaaagcgtcagaatctgctcggcgtacgacacaagcaaaatcggccatatgagaccgaatccctgaacaatcaggtgagccgccagccataagaatgcggtgacagtgagaaggatgatgatttttccagccgttctgaagatccgtttcatcctgtcaccacaaaccgatacccgagcccccgcaccgtatggatggcaaacggatagtctttttccggaaaccgttctctcagccttttaatatgcacatcaacggtccgctcgtcaccttcataatcaaagccccaaatatcttctattaattgttctcttgaaaacgtcttattcggataaccggcgagcttaaataaaagctcaaattcacgccggggcaatgtcaatcccgctccgccgccgcgcgttacggtgcgggattgcttatctaatgtgaccgttccgatggtcagcagtttttcagcggtgatccggtaccgtttcagcaatgctttgacccttgcttccagctcaagcggctcaaacggtttgacgagataatcatccgctccggaagtaaaaccttgcactttgtccagcgtttcgccttttgccgtcagcatcaaaatcggaatgtccgtaaagctgcggacggcttcactgacttcaaacccgtccattttcggcatcatcacatccagtatgatgagatctataggtgctgattcgatcagccgcaccgccgcttccccgtcttccgcttctgcgacgtcaaaaccgctctgctccatcataaggcggacaagctcacggatatggcggtcatcatccgcaaccaatatgacagccatgaaaatccctccttctgcttttttgcctgtcttcttttaatgaatcgacatgatgtctattaaccgtcttattttttcattgtctcctgtatcgacagacactttttttgtatggcggatcatttcctccgtcacttctttcattacgccttgatcagtatcttcacgagactcccagcgcaaaggaacattgtatacctgaatggtgccgtcaccattgctgctgtaagtgactgacccatcgattaaccgggagcctgctaactgcgtaacatcttccggatagcgggcgctcgtgtgatcgtcagggttgacgagtgctccggccggaatgcggcgaacgttcaattcatctatctgctgattttccccaagctgcagccagatgcgggcatattcaatttgcagaggagaataatctgccgacatgttatccggttcgcttttgtccgcagagacgtgatgtgaatctttgtttacgggttcttttttttctgccgctgatgctgtttcagcctttttgatgccgctgctttctccggccggacttgaagaatggctcggctcttcatcgttaccacccgtacacccggcagtcataaatacgagcagtaaggccgcgtgacaataaaaaatctttgtgcgttttttcatcatttaaccctcgcttccaatgaataggattccggctgcaaaataaaaagcagctttttcagctgctttttattcataaagtcttgctttacacagctttgttttctaagtcggcattcagcttcagctgctgctccgcaaaatcgcggtacaacgaatgggatgccattaattcatggtgtgtgccccgtccggtgatttcaccctgttcgacaaagagaagctgatctgcatccacaaccgtggataaacggtgggcaatcacaatcgtggtgcggcctttcattagaacttccagcgcctgctgcacccatttttcagattggctgtccagacttgatgtcgcttcatcaagcatcagaatgctcgggttacgaaggagagctctggcaatggcgatgcgctggcgctgtcctcctgaaagcataattccccgctcaccgacctcggtttcaaatttcttcggtaagtcttcaataaattgcagggcgtaggccatgtcagccgcttgcctcagttcctcatcagtcacctcgcgttttaatccgtagcagatattgtcgcggatggtgcctgacattaacgggctttcttgcgacacgtagccgatatgctcccgccatgactcaagggaatacgcatcaatcggttcatttccgagcaggatgctgcccgcagtcggattgtagaatcgttcaagcagcttaaataacgttgtttttccgccgccgctcggtccgacgatcgcggtgactttgccggcctcaatcgtagccgtaatgtcttttaagatggtttgatctgttttgtagccgaatgagacttgttcgagcttaatcggctgatccgcgttttcaatggcttttccggtttggatatcttcttctttttctgcaagaatatgaatcatccgttccgttgcgccgacggatttttgaagctgtgtgaaaaatgaagtgatctggcccatcggcataatgatctgaaacaaatacaggataaaggcaacgagtgcgccggctgtcaattcaccggatgacacctgcatcccgccgtacccgatgacagcgaccagcgccgccattaatacaagtgtaataagcgggcctacgagcgactgcaccttcgcctcacgcagcccgagtttaaagagtgccatgatgcctgcttttccgcgtccgtattccgcttcttcagcgtttgacgcttttacaagcctgatttccgggaggatgtggtttaataatccggtgaatctcgccgtttcatcctgtgtttcccgagaaattttaaacattttccggccgatcggcactaaaatcaccgcagccagcggcacgacgatcagcacaagcaatgtgagcttccagttcatgaaaaataagatcgtcagtgacccgataacggaaatgattccggtaataaatccgctgatattgtttgtgatcagctcttttaccaccattgtgtcattggtgacacggctgatcgtttctcccgtggcgtttttgtcaaaataagagacgggcagtttaattaatttctgccacaacaaatcacgcagtcccgagatgattttctggccgctgtagttcagggcgtaggtggcgtaggcgcttaatgcggcctgtacgataaacacggctgcgatgattccgatttgcacgcctgacagcgacgacatggaaaagccgtcaacgagctgctttgtcaatagcggaatcagcaggctgacgagcgttgtcacaatactgagagacagcgcgaaggccagcataccgtatgatggttttgtttttttgactaatgaaaagaatgagctgaatttccctttaggttttggttgtttattcggcatatgttttcctcctatatcactgtttatactataacggatgtgcatgaacggaatatgaacaaaacgtacatttttgacaaaaaccaaaataaactctattagtcaatattatcaaattcacctgcctccggttgcggaaataaggaatatttaattgaatgtttaagtttgacagattaaaaacctcacggatctctccgtgaggtttgttttactcagatgctgaatggcgttttgcaagaacgtcaagcacgtcgtccaaaggaagcgactgcgcacgcagaagaacgagcaaatgatacagcagatccgccgcttcccattttaattcttcatggtcccggtttttcgcggcgataataacctctgcggcttcttcgccgacttttttgaggattttatcgacgccttcccgaaacagatacgttgtgtaggctccgtcaggcatctccgcctgccgtttggcgattacgctttccagttcatttaagatgccgaaacgatcctgcgcgtccgctttttccgaagaaaagcagctgtagcttcccttatggcatgcgggtcctgaaggctccgcaagcacgacaagagcatcttgatcgcaatcatagcggatggctttcaccttttgggtattccccgacgtcgctcctttatgccacagctccccgcgtgaacggctgtaaaaccaggtttctttcgtttctatcgttttttcgtaggattcacgattcatataagccagtgtcagtacttctttgcttgccgcatcctgcacgatggcgggaatcagtccggcctcgtcaaaccgcagttcatctgcccgtttcatctcacattcaccccgtgtttcttcatataatctttcacttcttttatagatgtctctttgtaatggaaaatggaagctgcaagcgcggcgtccgcttcaccgatcgtgaaggcttcaagcatatggcgcgcgctgccggctccccctgacgcaatgacgggcaccgggacggcacgtgtgacaagctgtgtgagcgtatgattaaagcctgttttctcaccatctgcgtccatgcttgtcagcaggatttcacccgctccccggctgacggcttcttttgcccaggccgtgacttcccactcggttttctgtctgccgccgtgtgtgtacactttatagcaatccgaatcttcatcatactttgcgtcaatcgccgctacgatgcattgcgagccgaaaaaatctgctccttccgtaatcagctcggggcggaggacggccgctgtattaacagatactttatcagcgccggcgcgaagcatccgtttcatatcgcttaattgattgattccgccgccgaccgtaaacggaatcgccagttttgccgcaacttgttctacgacgtctgtcatcgtcttgcggccttcgtgagaggcggaaatgtcgagaaaaacaagttcgtcagcgccctccctgtcgtaagcttcggccagctcgacaggatcgcccgcatctttcagcccgagaaattgaatgcctttgacgacgcggccttctttcacatcgagacacggaatgattcgtttcgtgatcatgcgtccttcaccccgctgagcgcttcggctaatgtaaattgttttgtatacagcgcttttccgataatcgctcccgatacgccggcgtctttgaagcgggccagtgctgtgaggtcggcgactgagctgactccgcctgaagcgatgacggtttttcccgttgcttttgcgagctgaacggtgctttcgatgttcggtcctgacagcatgccgtcagttgcaatatccgtgaaaatgaaggtttccgctccttcggccgccaattcacggcccagatcggccgcccttaccgaggatgtttccagccagccttccgtcgagacatatccgttccttgcatcaagaccgatcgcgattttgccgccgtattgtttcagcatgctcttcacaaatgccggatcggaaacggccgagctgccgagaataacgcgatcaacaccttgtgataaataaccgtacacatccgcttcagaacggatcccgccgccgatctcgactttgacatcaagctgccgcgcaatgtcaagaacatgcctgtcgtttactttcctgcctgctttcgcgccgtcaaggtccacgagatgaatccattcggcaccttcgtttgcaaattgcgccgccatgtctaaaggagagtcaccgtatatcgtttccttgccgtaatcgccttggatgaggcggacgcatttgccgtttctcatatcgattgccggatataatgtaaaagcgttcatttcttcaccttctgttccgctgccatttttgtaaattgcgttaagatcgccattccggccgtaccgcttttttccgggtgaaactgtgcaccgaagacattgcgtttcccgacgaccgccggaacacgaacgccgtactcagcgcttgccagaagatcgccgtcttccatcccgtctatataataggaatggacaaagtaaacgaagccttcttccgcttccgaaagcaaaggagacgtttggtgaaacgtcagccggttccagcccatatgcggcaccttcagcttgtttccttcggcatctctgtctttgagtctcacagcttttccggctaataaaccgagtccttttgcagagccgttttcggtgctttcttcgaaaatgagctgcataccgaggcagatgccgaggagcagcttccccttgtcaaccatacggtgtatgaattgatcaagcttcgcgctgcgtaaattgtccatggcgtcactgaatgatccgacaccggggagaataaaagcatccgctttttcaagctcttccggccggtctgatacgacatacgggacgccgacgcgttccagcgccttcgacacgctgaataaattgcccataccgtaatcaattacaccgatcatttacagcattcctttcgtagacggcacgcccttgacgcgcggatcaatggatgacgcttcgtccagcgctctgccaagcgccttaaacacggcttctatcatatgatgcgtattcgtgccgtaatgaacgatgacgtgcagattcattctcgcttcgagcgccagtttccataagaattcatgtaccagctcggtatcaaacgttccgactttcgcttgcggaaatgcagcgcgcatctcaaggtgcggccggttgctcaggtctacggcgacttgggcgagagcttcgtccatcggtactagcgctgatccgtaccgtttgatcccttttttatcaccgagcgcctccaaaaaagcctgccctaaacagatgccgatatcttcagtcgtatggtgatcatctatctccgtatcgccttttgcgtcaacagttaaattgaattgcccgtgctttgtgaacaaatcaagcatatgagtcataaacggcacatccgtgctgatgtcggcttttccttctccgtctatttcgaaagccagcttaatatcggtctcatttgttgttctggcgcgttccgcttttctcatcggtcattcctccgtttctcgcttcaatcgatcttgcgtgcgcttcaagcccttccagtctcgcgaaggcggaaatgctgtccgcgtgcgtttcaaatgccttccggctgtatgagatgatgctcgatttcttttgaaaatctgttacattcaacgggcttgaaaaccgcgccgttccgtttgtcggcaaaacgtgattcggtccggcaaaataatcgccgaccggttcagcgctgtatcgccctaagaaaatcgcccccgcgtgtctgatgcttccaagcaaagcctccggcgaatgcgtcatgatttctaaatgctcgggcgccagcgcattcaccgtgtccactgcatcttccatcgattccgtaatgtaaatgcggccgtgatccctgatcgacgcttcggcgatttctttgcgcggcagcgtctgaagctgtttattcacctcatctgatacggcttcggcaagcttccgtgagtcggtgacaagcacgcttgagctgagcgtatcgtgttctgcctgtgaaagcaggtcagcagctacttctttgggcaccgccgtatcgtctgccaggaccacgatttcactgggcccggcaatcatgtcaatatccacaacgccgaagacttcgcgcttcgcgagtgctacaaatatattgccggggcccgtgatcttatcaacaggctgtatcgtttcggttccgtaagcgagcgcggcaatcgcctgcgcgcctcccgctttgtaaatttcctttatgccgagctcagacgccgccgccagaacgcccggcgaaaggcggccgtcttttcccggaggactgacgagaacgatccgttccactcccgcagcgagagcggggatgacattcattaaaacggaagacggataagcggccgtcccgcccggcacgtatacgcccgcggaatcgagcgccgttattttctgcccgagcatcgagccgtctttgcgatggtaaaaccacgaggattgcagctggcgttcgtgatattctttaatattggcaatcgcctgtctgatcacttccaacagctgatcatcaagcagacggtacgcctcggtgacttcctctgcactcacggccatttggttcaggctgatgccgtcaaatgtttttgtataggccaaaacggctttgtcaccgttttgtctgacgtcttcaataatctccctgacggttttccgctgctcttcggttccgctgtcgatggaacgcttcagtgaaaaccgctcgcttctttttactgcggttattttcattgtgccgtttctccttccacaaccctggccagcctggccgccatttcgtcgattacatcatccttcatgcggtagctgaccggattgacgataaaacgcgatgtgatgtcacaaatatgttctgattcaacgagaccgttttcttttaatgtccgcccggttgatacgatatctacgattctgtcagcaagcccgattaaaggcgccaattcaatcgaaccgttcagcttaatgatttccacctgctcgccctgctctctgaaataacttgacgcaacattcggatatttcgtcgcaatcctcggggcgactccgttccaatccgctccgggaagccccgcaacggcgagatggcatttgctgattttcagatcgagcacctcatacacgtcacgctcttcctcaagcatgacatcctttccggcaataccggcatcagcgacgccatgctcgacataagtcgtcacatccatcggctttgccagaataaagcggagattttcttcaggaacgtcaatgatcagctttctcgattcttcaaactcctcgggcagcctgtacccggcctgccgcagcaacccggccgcttcttcgaatatccgtccttttggcattgccattgtgagtaccttacccattctgctcttcctttctggcaccgataaagtatgtgacgtttgcaaatgattttgtcatatgatcgatattttcaatgcccgccagatcctgcaggacgacttttctgcctctcgccctttcttcctccgcgaataaaatggcctgcgcccgctgctccttgctgaaaatcacggcgtccgcttcactagtttcttcctggatgccgagcgcttcaatcagcctgtcgatacggagcccgaaacccgtggcgggagcgggactgccgaaatggccgagaagattgttatagcgtccgccgcttccgatgacaaaaccgacatttgccgcatacacttcgaataaaattcccgtgtaataactcatatggcttaccatattcagatcaaggcgaatatgctcggcacatccgtaatcctcaagaatgtcccacaggtcttccagctcctgaatcaagctttgtccggagatgccgatgatctcctccgccttggcgcagatctctttcccgcctcgcaattccagaagtgcgagcagccggcttttgtctattgaagaaagcggaagcgatttgacatgttccctgtatcccacgtaattcttctcaaagagaaagcgccgcagaacatccgcccgctcagcattgcccagaacctcgacaaacagctcatcagcgagtccggcatggccgatcgcgattttaaaccggtgcaatcccgcgtttttcaaagcgccggccgccagcgcaatcacctcggcgtccgcgcttgttgatccgtcgccgatcagctccgcgcctacctgttcgaattctgccggacgtccgccttcccgctcctgagcgcgatagacgcttgccgcgtaccccgctctgagcggatgattgtgtttgtgcagcttagacgccgccaccctggcaatcggtccggtcatgtcaggccgaagcacaagcgtttttccgtcctgatcgagaagcttaaacagctgctgttcttcaatggctgactggacgcctactgtttcataaaattcaagggtcggcgtctccataaactgataaccccatttatcaattaaatccgtcagtgtggaacggacttttttctttgcttcgtataaaccgggcagcgtatctctcatgccatgcggtttctcaaacataaacatttgccttttacacctccgctttgtctgaaggaaaattccgaatcctttagttcgctaatatgataatatgttagcagataaaagaatgaattgcaacgcccaatgtccgcctactcttttccataaacatggctaaagaatgaacaaacctgtaaacatatcggaacgatcgaatcatattgagcagaagtgctataatacatagaatagcttcaacagaaacaagggagaagaattgataatgaagacgcttggaacattatgtgtgctgattctgacagccgtccttgtctatctgggatataacatctatacaaacgatattcattttaattttttcaatcagcagtccgacgagcctgatgagaaaacaccgttaaaagggagcgcgtcaccgctgaatgtcgttctgtacagacagatggattctcccagactgtacaatggctgtgaggtgacaagccttgccatgattttgaacaatgccggatatcatgtgtcaaaaaatacattggcggataaaatcaataaagttccgctcacatacagcagcgggctgaagggagatccgaatgaaggatttgccggagatatggaaaacggcccgggtttaggcgtttatcatgagccgattgataaacttgccaaagaatatgcgggaaacaaagtatacgacctgacgggaaaagacatttcttcagtgtaccgccagcttgaaaaagggcggccggtctgggtgattaccaccacatcctttaagccggttgataatatgcagacttggaatacgccgaacggaaaaatcgacattacgttcagcatgcatagcgtagccgttaccggttatgatcacgattatgtatacgttaatgatccttatggctataaaaacagaaaaacaaaccgatctgactttgaaaaagcctggaagcagatgggcagccaggccattgtgatcaagtcataaaaaaaccccgctgacgttaatcagcggggttttcccattcgttctttcatttcttcgtccgtatagatcacctgcatcggatttcctccgacaaacgccccggccgggacatctttgtgcaccagcgtgccggctgatacaacggctccgctcccgatggtgacgccgggcagaatcgttgtgtttgccccgatcattacctcgtcaccgattgtgacatcaccggtccggtactcatgtattaaatattcatgagccaaaatcgtcgtattgtagccgatgatgctgttttctccgacagtgattttttcaggaaacataatatccggcatcaccatcaacgcgaatgaggtttgttttccgacattcattttcaaaaaggttcggtacagccagtttttcacgcttaaaaacggcgtataccttgcgatctgaatgatgatgaaatttttcatcaccttcagaaagggaaccgtctgataaacatgccacaatgaatttgcacctgaaaccggatagcggtctgtttttctcacggattacttcaccccggtgatgtgcaataaatcactcattttctcaagcatataatcgggttcataggcggaaagcgtctgtgcgcctttaatcgtccacgcgacgccggctgttttcgtgccggcgttttttcccgccatgacatcgtgataattgtcaccgaccattatggcttccgacggatcgcacccaagccggctgagagcaagccgcacaggctcagggtcaggcttcggatgctttacatcatcaagcgtgacgacagtatcgaaaaacgccccgatgcctgtcagcttcaatcccatattgactgtatccctcagcttcgtggtgacaatcccgagctgatagcccgcttttttcaattcatccagcgtttcgtaaaccgtttcgtactccgtgacgagctcatcgtgcttttcatggttgaatgctctgtacatgctgatcatctcatcgcacttttcagcattaatgcctgaaaacgtttcatacagaggcgggccgataaacggaagcacatcttcccttttgaactgccccgggcaataatgatcaagcgtatgaagataagaagcgataatcagttcattcgtgtcaatcagcgtgccgtcgagatcgaataaaatggcggttacacgtttatcagtcatcttatgtcctttccgatttcagacgtcagtccgtatctgcataccgcttatcggcataccctttaacgcgtctgaaaaccattaaaataatcgcaagaacaatcagcacaatggaaatgacctgcgcgatccgaagctggctcgtaagcatcaggctgtccgtccgcattccctcaataaagtatctgccgatcgaataccagatcacatacgtcaaaaacagattgcccctgcgcaggttcacgcggcggagcagaagcagaatcacgacgcccgcaaaactccacagcgattcatacaaaaacgtcgggtgataatattgtccgtctatgtacatctgattaatgatgaaatccggaagatgcagactttccaaaaatgaccggctgaccgcttcaccgtgagcctcttggttgataaagttcccccagcgcccgatggcctggccgagcagaatactcggcgcggcaatatccgccagcttccagaatgagatccctcttacttttgaaaagacgattcccgttgcgatcgcgccgatcaatccgccgtgaatcgcgatgccgcctttccaggttttaatgattaccccggggtgttccgagtaatagctccactcgaaaagcacatagtatgcccgtgcgcaaatgattgcgatcgggatggcgaaaagaacaagatcaataaaaatgtcctttttcagcccccgcttttcactctccctcatggccatccaaagccctaataacgcacccgcgccgataatgatcccgtaccagtgcacggataaaggcccgagctgcaaggcaatcggattgattggtgttcctgcttcgttcatattattgccaactcctattcgtcttgttcgccgtcttcaatgacatccgccagcttattcgtgaattgctcggcagcatttaagcccatccgcttcaatctgaagttcatcgccgcaacttcgataataacggcgagatttcgcccagggcggactggaatggtcagttttgtaatttccgtatcaatgattttcattttttcttcttcaagtccgagacggtcgtattgcttcccttgctcccaaagctcaaggtccatgacgattgtaattcttttattgcttctgacggcgcccgctccgaacagcgtcatgacatttataatgccgagacccctgatttcaagcagatgctcaatcagatcaggcgcattcccgacgagcgtatcctgatcctcctgccggatttcgacgcagtcatccgcgacaagacgatggccgcgtttgacgagctccagggccgtttcacttttaccgacgccgctttttcccgttatgagcacaccgacgccgtatatatccacaagcacgccgtgaatggcggttgtcggcgcgagacggctctcaagaaaattcgtcagccggcttgacagtctggttgttttcagaggggatctgagcacaggcacgccgtttttctcggatgcttctacaagctccggcgggatcggcatatctctggaaagtatgatagccggcgtcacatcggtgcacagcgattccatccgctgttttttatcctcctcaggaagctgatcgaaaaatgacagctccgtttttcctaaaagctgcacccgttctctcgggtaatatgtaaaataaccggcgatttcaataccgggccgtgataaatcactcatcgtaatcgggcggttaatcccttcttctccgctgatcaattctaaatggaactgctccattacgtctttggtccgaacctttgccaagatatgttcctcctgttctgggatgttccgagctttgaacagttatattttatcactttaccgtctgaaccaaaacagatttatacaattccggcataactggtctagataactagtctgaaaaagagtaaaataaaactaacaactaaccagaaaggcgtgttttaaagtggctgaaagcttgttaatcagcggtgcggacatcgtaacagaagaggaaatcatccgaaacggttttctcggtataaaggacggcatcatttcttacgcggggaaaacaagaccgcaagaaacgtatgagaaggaatggaaggcgcccgcgggctcgtatgcgcttcccggaatgattgatattcatattcacggcggatacggcgcggatacgatggatgctgatattgcagctcttgatacaatgtccgcccggctgcccgaagaaggaacaacctcttttttagcgacaacgataacacaacagcacgaaaacattgaaaaagcgctcgtcaacgccaaaaaatgggcgtcttcctcaccgcaggcccaaaaaggcgctgagttgatcggcattcatttagaaggaccgtttgtctctccgaaaaaagcgggagcacagccgaaacaatggattacgccggccgatgccgggctctttcagaaatgggagcggcactccggaggtctgattaaaatcgtgacgcttgcaccggaagaagatcctgatttcagcctgatccgttatttaaaagaccggaacatcatcccgtcaatgggacacacagacgcgggagccgatcttttacaaaaagcggcggatgccggggcggtgcatatgacacacctcttcaacgccatgagctcctttcatcaccgtgagccggggggcatcggtacggctctcgcctgcggccgcatcacggcggagctgatcactgacggcattcattcccatcctttggccgttaagcttgcctatttggcgaaaggaagcaaaaacctgatcatgattacagactccatgcgggcaaaagggcttaaggacggagaatacgaattcggcggacaaagagtcaccgtttgcggagacaaagcgcttctctctgacgggacgctggccggttccattttaaaaatgaatgaaggcgcagcgctcatgcgcaggtttacaaactgctcatggctggatatagcaaatatgacatcggcaaatgcggcccgccgcctcggcatattcgaccgtaaaggaagcatcgccgaaggaaaagacgccgacgttgttctgacggacggacagtgcggcgtgctggccacgatttgccgcggaaacaccgcatatatctcaagggaggctgattggatatgaacgttatcacatgcagacattatgaagaattaagtgaaaaagccgcagcgattatcgctgaaacagtgaaacaaaagccggatgccgttctcggccttgcgacgggaggcactcctgaaggcgtatacaaagaacttgtgcggatgcaccgctcagagggcttgtcattcggggatgtcacgacaatcaaccttgatgaatacgccgggctttctcccgaggacaaaaacagctatcattattatatgaatacacatttttttgcacatatcgacagccgaaaggaccgccactttctccctgacggacgggcagacgatctcgatgccgaatgcggacgctatgaccgattgattcaaacactcggcggagcggatatacagcttttaggcatcggacacaacggccatatcggctttaatgaacccgggacgccatttgaatcccgaacccatgtcgttgagctgaatgaagagacaagacaggcgaatgcgcggtactttccgtcaattgatcaagtccctgtaaaagccctgacaatggggatcgggacgattttgtccggcaaacggattttgatcatggcatccggaaaaagcaaggcccaagcggtgaagcagcttctggacgggcgcatcagcgaagcattccccgcctccgccctgcacgcgcatccggatgtgacggtcttgattgatgaaaaggctgcgggcggcgattgaaaggatttgacctatgcagattgataaacaatctccgattccgatttactttcagattatggaacaattaaaaacacaaatcaaaaacggcgagctgaaagcggatgcgctgcttccgtcggagcgggaatacgccgaacaattcggcatcagccgaatgacggtgcgccaggcgctttccaatctggtgaatgaaggatttttatacaggcagaaaggccggggaacgttcgtcagcaaactgaagatggaacagccgcttcaagggctgacaagttttacggaagatatgagaagccggggcatgaagccggggagcagacttgccgaataccagctgattcaggcgacggaagaattatcttctatcctgggatgcggctatcaggcaacgcttcataaaatcatccgcgtccggctggcgaatgatatcccgatggcgattgaagcctcgtacattccgtttgacaaagcgggaaaactggacgcctctcattttcaatcatccatgtatgagcatattgaagcgtacaatcagatgccgatctcacgggcaaaacaagagcttgaaccgggagccgcttccgaggaagaagctgagctgctcggtatccagcccggcgcccccgtcctctatatcaagcggaccacttatctgcaggacggcactgcctttgagcacgtcaaatccgcctacagaggcgaccgctacacattcgtgcattatatggacagggtgaaatgaaacatctccaaccgttacgggttggagatgtttttttgatctgccattttcaaatcaagccggggaatgttctctatgactctgtcaaaacggagaggctggggttctgatatctatttttataaagaaaagagtaataaaatgctaccctctgttttggacaatatacggaacctgctttgaaaccagcagcagcggttctttgtttttatgagccagtgaaaacatgattgcgccttcaatcatcgagttgattgtcaccccgagcttctccgcttcctcttgttcaaacccatgttcaagaaattttgccgcaaacacatccgtccacttcttgaacacctcaacacatgtgcatcttaacgtttcattgatcagagcggtctcacccgccagcaatccaaccggcacgccctcaatattctgcggatcattaaactgttcagccgttacatgaataaagtgctgaatcgcttctatagggtccgcgaattgagacatactattctgtatttgcttttcaacgcatcttcccgtatatttgatcgccgcaatggcgagttctgcttttccatttggaaagtgatgatacacagaccctctgggtgctccgctctcttttataatttgattcaaaccagtcgcatgatatccctgaatctgaaaaagatatgcagaggtttgaataattctttcttttgtcccggttttactgttcattatgtttcctcctgcatattacgaaaaccaatcgattttagtatagaaaagggacataaaaaagtcaaaagcacttagtaccgccatgcatgttacagaaaaaaacctgctgaccgtcagattttcttctgacgatcagcaggctgtatgttttcgttatgggtttgaggcatgcctgaaatcaaactgatccggagccgggcgatacggcgtatttcccgttttgaacatccacagcggtgatattgttttgccgttgtacgggtccttcacgacggtgtaccagtaataaacggaatcaggctgcaggccgtcccagacccaatttgcggtttttccgctttttacgtgttttttatgaccgagcagttcgttcgtatagacgttgcattcaaaataatcggtcgctacccttttcctcttcggctgtaaatccatttctgctgagaattcgtctttatcagcgaacagatcggtgtcatagtaattgatgtcatccgtgtacggcgagtaggagaacatgtgaacctgattggcggcctgatcgaattgcatcatgcgcataaagccctgccccccttccggaccgtcctggtagtcggtcagaatttggtggacgaggcggtccggttttccgtccccgtcatcgtcaagcgcatcggtttttttcatggcgttatggtaatggccgcttaataccatcgccacattgcgattcggcttgacgacttttcgatagatcgtctccccgatcgggcttcgatttccgctcacaagcaagtactcatgaaagcataagatggcggttcggtccggatacctcttcagcacttgattgatccagtcaatctcttgttccgcaatgccccagcccatataaatcataataaaatcgttcccgcttgccgacagcagatcataatgcccgcggttatttttgtatgatccgccgtaatgcatgttctgttcaaaccggcggctcccgaagaaatccccgaatgttcggtatgtgccgtctttatggccgacgtcgtgattgccggcaagcactccgtacggaattcccgccttgtcaagtgtccgcatggagtgatcggcgtttttccactgtttcatcaccattgaatcatcgacgatatcaccggtatgaaagacatatttaatattgtgcttttccttattttctttgatccactccgtcattttgtcaaaaatgtgcgggtgcccttgtgcgtaatactgtgtatccgacatccagataaacgtgtaattgcctttcgccggtatttgatcctgcacgatgacattcatttttgagttcttcaccacatccgctgcggaaacggcggcttttaatgtaaacggctttttatctttggcaagaacgctgtccgcctcctgccagcggcttgtccggtaattccaaatatacatggttacctttcggccgggcagagagcttcctttccagaccgcctcagccagatccgtttcgtcgatagacgggtcaacggagacttcgaaccggtgataaggaaaacgctccatactttccgccgatacggtttttccgtcatttgccgagatgcggttcatttccggcagggtaaacggcatttcattttcttttatgcccctcggcggttccgttaatgaggcgtgtttatacactttcacgctgcccggattccgcgcggtataacggaagccgcgataaaatgatacattcatgtcatccttcgtcgggtcttttacccggacggacagctttgctttgtgggcgccgattttttgatcggcaagctccggctggttcggctcctcccgtttgatatggaaggtgcggacggacgttgtttcatttccggcaaggtctgccgcaataattgtaagggtatgttttccgggcttaagatcggctgatgacgtgtgatgcgggagcgtaatgctttctccgtccaaaaacgctttgacctcttccactttgctccatttgtcacggatgtccgcattcagctcaacattacctttcagcgccgcgccttctttgatacccgggacaatcttcggccctgtattgtccacccgcacagattggctcagctgctcctcaccgtcgctaacaaaaatatggtgatagccttcagaaagcttcgtcgtgttccacggcagcagccgtgacgtaaacaaatgatccggcaggctgaatgagaaggtcttctgctgattcgcccgcctgccgtcaccgataaagagctgctcagccggatccgtcttcccgtctttgatcaccgttccgtccgaaagcaccagacgggcatgtttcacgacaaaatcatcccgattctctcccgtgtcatacggagaaacctttgagcccgaacggatggatactttctgcgttttgccccctttttgcagcagacgttccggaaggagaaccgagtgcgttctgtagcggtgagacggatcgtcaaaaatgtgcagcacctcattttccattatgacggtgttttgaaaataaagattcgttttccgggcatcgaaggcgaaatagacctctttttccagcgccggccgggtctcctgccgcttgccgtcaatccacagcttgatcttatcggcgctgacgtcggaagtcgctttgagcagataggtgccggatatcgtatcttcgggttcaacattcattctgagtccgtgtgatttgctcgtctgttcaatgtcaatcattttgacgggcgtttttgcttcattttctccatcactggctgcgatataatactcaagctgatcctggccgagcagttccggggaataaagaatgtgatggtataagctgtcgttgcggtctttttcggccagaattcgtttgaatggttttttctcattggtccggtaataaaacgcggctgttttgacaaggtttttgtcttttatgtcagcctttaattcaatgctttcagcgggccggacgggctttctgtctgtaaggtcttcgatgaccggtttttccttgtcaggtttgatcacccttttctgctgcgggatctgcgcctgaaaaacagagcccggtgacggcttatgctcgctcgtggagatcttcagcaattctcccgttccgttcagcggatatttgtacagcaaagaagtcagccggcggaaagcgtgtttccggtaatgcgctgaggcgataccctttccggtatttgccgacagcaccaccgtacgcgggcggccgttggacattccgtccgtcccttcgatgacggcgagatgttttccctccttcaggcgtgtcccgtaatagcggttgaaatcatctatcgtcagttctgatgcggcgcgcctcagccaaaacacgtaagtcccgcctgacggaatgacggtatcttctttcggcctccatatcatgtctgattccggcccttccttcggatagcggtagcggatatggtagtctttaaaatgaatgggcctgtccgtcgtgttatacacctcgataaattcataggcatcagcgccgtcttcatttttcgtatcaaccgcaagctccgtaatcatcagctcgggaatatgattcaaatcggcttgatagccgtccagcttcagcagctttttctccgattccgcccgctgtctgccgttggtgaaaacgaggtaatattccaattctccattccagatatcccgttttgaaacctgggccgtaaacagccggattgcgcctggcgcgggctccatcggcaccattttaaaccccagctcattgctttgtttataaaaaagaaacgccgaaaacgcttgatagtcagcattccgtacatgagcctgtatgaacaggtttcttttcatttccgcctttacttcgatttggggaggattctccagaagcggtatgtaatgaggcggctgtccgaattcctgctgattcacggggattgccgattctttgcgcgccgcatccgcagaaggactcacacaaagcaaaccaatcagaaaaaagagcgtcatcacaagtttcatctcattacctccctatgcattatgttgcgtcaggaggctgccgcttatgtaaatcacacataaaaaagctgccctctcgggacagctcgttttttacctttttctaagcggctccaatatgcctttttggatcagcaagtggaaaacggacagcacgacagacgcccaaatggcggtgccgaacccatcaatctgaaagctgtctcccatcaaggctgcggtcatcattaacgtaatggcgttgatgacaaacagaaagaggccgagggtcacaaccgtgacgggcaatgtcaatatgacgatgatcggcttgatcagcacatttaacacagaaagaatcacactggcgatgacagccgctccgatactgctgatatggacggaatcaaaatatcccgcgataacgattaataataaagcatttactaaaatgctgactgcccatttgatcatttatttcaaatctccttctaaaggtacaacaaaacaccagataatatatacaatcggcacgattccgctcgtgacaagcgctaatacaacagtgataatgcgcaaaagcgacgcatccatattgatgtactccgccaaaccgccgacgacgccggcgattttacggtttttttctgaacggtaaagtcttttcatccaatcacctctgagtatgcttgagcttaatggctcctgttaacgattctgagaaaatcgagagatgctgatcatggccttgatttgatgccagcatcagttctttttgaatggtatcattcttttcctttaaaatttccgcatcaatcagctcatggctgagagagccgagattgcttttcagctccgctttcaccgccgaatcatcaggcagagcgatctccacgtttccggtcgtcgttttcgtgtagatggagcggcagtgcggcgctgtcacggtaagcatgatattgccgttaaagctttgaacgtcaatggattcactcgatccgcgcaaatcaatcaagccgttgatcgtttccgcttcaatcgcgccgcattgatgtccggccagcttgatttgtccgttagccgtttccgccgacgctttatcagccgtcaaatgagagaatgacagaacgccgtttgtcgttttcgccgagaattcttttacatgtaaatgttcccctctgatcggtccgttaaacagcttcactcttatcttatcgtactctttctggggaacataaagcgtgacattggttttcatcgttttcttttccgtgcggacaaaaaacttattgcccttcacttcacactcaatgtgctgaagaaatgcggtgcgcgccgcctcctgactgtccgcccggtacactttcgcctggcactccgctctgatatcttcatccgcccacggcacgatattgacgctgccgtttgcgatctgcatatcaatggccgagaattcactgtctttaaattgaaaaatatgctgcacttcgtgtgcgtggccgaaattcagatcaagatccgcttccttcacttttttgacggcagaatcaatccagtcgaacagcttcgccccgagcgacggcttttggcttccttttgccccgctttcgaaatcttccgcaggttcctggacctctgcagataatgcggtgatctgctcttctttttctttatattcatgatccagtttttcaatgagcgtcagtgcttcctgcgccgtcagcatgccgtcttccacaagctttaaaatccgttctttctcctgtttcatacaaaacgcctcccccgacttttcttacacctggcgtaacaccttaattccctgcacgatattccaaatgaccattccgatgaggatcagaaaataaacagctgctcctgttatcataacaaaaacgggcaccatactctccccctgagccgtaatcaatccgccgacaacacccgcggtcacaatcagcaatcccgcaaacggaatgatatgggaaatcagagcgcgcatggcatgccgcttcgtctctttttcatcgacgacaaagtaagccacaatcggaagaatgagcggcgcgagaaacacgctgaaataacagattgatgcgataatcgcttgatttcggttcaataaaaacactccctgtgccgtaatgtaaaaacccttccttatacatacgtatgacgcatgggcgggtttcattttcatgctaaggacatgcttcgttatacgtaatttttgatttcagagatttcactatagaatcttttccccgaaccgattacaatatgtaacaaagcctgaccgtatgcaaggaggacatacaaatggagaaagatcccgaaaacgcccaagtaacggaagagagtctgcgaaatttaattcgcgaacagaaaagaatgaacagcgaaatgctggctgaattggaacagatcaaagcagcccctcttcccatttcccatgatatccaatatataaaagtgctgctggacagcagcagcacccatattctgcaggacttaatgcatttaagcaaacagcttccccaacagaaaaaagcctgtaacacaacagcccaaaaccggtgagttttgggctgtttttattgatctattatgtggctgccgtttctttttcagccagcaatgttttcatccgttttttatcacgttccattaccggtttcagatagcggcccgtatatgattctttcacttccacaacttcttcaggcgtcccggaggctacgatcgtgccgccgcccgctccgccttcaggtcccagatcgacgatgtagtccgccgttttaatgatatcgagattgtgttcaatgaccaaaacggtatcaccgttatcgacgagtctttgaagcacaaccaaaagccttgcgatatcatcaacgtggaggcctgtcgtcggttcgtccaaaatatacagcgtccggcctgtggaacgcttatgcaattcggaagcaagcttgacgcgctgcgcttctccgcctgacagcgtcgtcgccggctggccgagcgtcacgtacccgagtccgacatcggcaagcgtttgaagcttgcgtttgattttcgggatattttcaaagaaagacagagcatcttccaccgtcatatccagaacgtcagaaatgctttttcctttgtatgtgacctcaagcgtctcccggttgtaacgtttgccgtggcacacttcacacgggacgtacacgtcaggaaggaaatgcatctcaattttgatgatgccgtcgccgcggcaggcctcacagcgcccgccttttacattaaaactgaaccggccttttttatagccgcgcacctttgcttcatttgtctgcgcgaatacatcgcggatatcatcaaacacgcccgtataagttgccggatttgatctcggtgtccggccgatcggcgcctggtcgatgtcgatcaccttatcaaggtggtcgaggcctttgatttctttatggcttcccggtttcgctttggctttatgaagcttttgcgcaagcgccttatgcagaatttcattcacaagcgtgctttttccggaaccggacacacctgtcaccgccgtaaaagtgccgagcgggaatttggcgttcgcttttttcaggttgttttctgaagcgcctttgatttcaatgaaccggccgtcaggctttcttctctccggaggcatcgggatgaattgaacccctgacaaatagcgtccggtcagagagtccgcatcattcatcacttcttcaggcgtccccgccgatatgacgcggccgccgtgaatgccggcgcccggaccgatatctatcaaataatcggcagccatcatcgtatcctcatcatgctcaacgacaatcagtgtgttgccgagatccctcatgtttttcagcgcgctgatcagacggtcattgtcacgctggtgaaggccgatggacggctcatcaagaatatacaggacgcctgacaaacgggagccgatctgcgtcgcaagcctgatgcgctgcgcttctccgcctgacagcgtgcccgccgcccggctcagcgtcagataatcaagaccgactttatctaagaagctgagccgctccacaatctctcttaaaattaaatcggcaatctgcatatctttcttagacagcgtcaggtttttgaaaaattcaagcgcgtcgccgacggaaagctccgtaatggttccgatatgacgcccgttgaccaaaacggcaagcgcttctttcttcagccggtagcctttgcacgtcgggcacgatttctgtgacatgtactgctccatctgttcacggatataatcggagcttgtctctttataccgtctctcaatattgcgcagcacaccttcaaattcaatttcattttcgcgcacttgtccgaaatcattctcgtatttaaagtaaatccgttcattgccgctgccgtacagcactttatcaagctgatgcttcggcaggtctttgaccggagtctccatatcaatgccgtaatggcggcagaccgtctgaagcagctgcggataatattgtgaactgatcggcgtccacggcgcgatggcgtgttcctttaatgacagctcgggattggggatgacgagctcaggatccacttccagcttcaagccgagaccgtcgcaagtcggacaggcgccgaacgggctgttaaacgaaaacagccggggttcaagctccccgatagaaaaaccgcacagcggacaagcgtgatgctcgctgaacatcagctcctcctgaccgatgacatctatcatgacacggccttcccctaaacggagcgcggtttccagcgagtcggaaagccgggcggcaacgccttccttgacaacgatccggtcaatgactacttcaatggaatgctttttgtttttttcaagttcaatatcgtcagaaagctcggccatttctccgtcaatccgcacccttacgtaaccttgctttctgatttggtcaagcactttgacatgggcgccttttctgcctgaaatgatcggcgcaagcacttgaagcttcgtccgctccggatattcaagaatccggtcaaccatctgttcaatcgtttgcgacgtaatttcaatgccgtgctccgggcagtgaggcttcccgactctcgcgtacagcagccggagataatcataaatctccgttaccgttccgacggttgaccgcggattgcggctcgtcgttttctgatcaatgctgatcgccggagaaagcccttcgatcgcatcaacgtccggcttatccatctgccctaaaaattggcgcgcataggcagaaagcgattcaacataccgcctctgtccttccgcgtaaatggtgtcaaaggcaagggatgattttcccgatccggacagccccgtcacgacgacgagctgatcccgcggaatcgttacatcaatgttttttaaattgtgcgcccttgcgcctttcacctcgatccggtcaattgccatgtgttcatcatccttccgctttaagctctaacagtaaatcacgaagctctgccgcccgctcgaaatcaagcgctctggccgcttctttcatttcgtgctccatttgctcaacgactttctggcgttctttcttcgtcatcttcgccagtttaggcgcggcttttgttttatattcttctttatcctcagcggcctgcgtcgcgcggatcacatcgcggatttccttattgatcgtttgcggcgtaatgccgtgaatttcgttaaagcgctcctgctgttcccggcggcgcttcgtttcattaatcgcgatttccatcgaatttgtgattttatcggcatacatgatgacgcggccttccgcgtttcgtgccgcccgtccgatcgtctgaatcagcgaacgttcagaacggaggaagccttctttatccgcatcgagaatggcgacaagtgacacttccggaatatcaagcccttccctcagcaggttgatgccgattaacacatcatgttttccgaggcggaggtcacggatgatttcaatccgttcaagcgtcttaatctcggaatgcagataattgaccttgatgccgatttccttgagataatcggtcagatcctctgacatttttttcgttaaagtcgtcacgagaacgcgttcattccgttctatcctcgcctgaatctcgccgatcagatcatcaatctgtccttcgatcggacggacgtcaatgaggggatcgaggagtcccgtcggtctgatgatctgctcgatcatttccggcgtatgctcaatttcatacggtcccggagtcgccgacacgtacacgatattgtgcatgtgtttctcaaattcctcgaatcggagcggacggttgtcaagcgctgacggcaggcggaacccgtgatcgacaagcacctgttttctcgcctggtcaccgttgaacatgccgcgcacctgcggaatcgtcacatgtgattcatcaacgacaatcataaaatcgtccggaaaataatcaagcagcgtatacggcgtagagcccggcggacggagtgtcaaatgtcttgaatagttctcgatccctgagcaaaaacccatttcccgcatcatttcaagatcatatctcgtccgctgctcaagccgctgcgcttcaaggagcttgccgttttcgtgcatgactttcaagcgctcctcaagctcctgttcaatattcagaatcgctttttccatcttttccgcccgggtgacgaagtgggaagccggaaaaatcgcgacatggtcacggtcgccgagaatttctccggtcaaagcgtcgacctctctgatccgctcaatttcatctccgaaaaattccactctgatacaatgttcgtcacgggaagccgggaatatttccacaacgtctccgcgcacgcggaacgtcccgcgctgaaagtcgatatcattgcgggcatactggatatctacaagctttctcagcagctcgttccgctcaatctccatttccggtctgagcgacacgaccatttcccggtattcttcaggcgaaccgagaccgtatatgcatgacacactcgcaataataatgacatctctccgttcaaacagagaggatgtcgcggagtgtctcagtttatcaatttcatcattaatgcttgcgtctttctctataaaagtatccgtttgaggcacgtatgcctccggctgatagtaatcgtaatagctgacaaaatattcgacagcgttgttcgggaaaaactccttaaactcgctgtacagctgtccggcaagggttttgttatgggcaatgaccagtgtcggtttattcacttctttaatcagattggacacggtaaaggttttgcccgtccctgtcgcacccaggagagtctggtgttttctgccttcctgtatgcctttgacaagcttctcaatcgcttgcggctgatctccctggggctgatatttcgagactaactcaaaacgatctttcacaaaaaagcctccgtttctttacgaaatcttcctattgatatagtaacacaatgacgggcaaaatcactaaaaatacgaactaaagttcgatggtttatttttaccaagtcaatttttgtataaaaaacctgcttttatggcgtaaaagcaggcattctatttcatattcaccatgtcaggcattgtctttctttttgtctgcttcttttttggccatgtacagccctccggccaccagcgatacgacatccaatccaacgataaaatacgtttcggtgtaaccctttaaataggatgcgaaaagcagtgcggctgtgagagcgatcgccacatagtggttaaacgtgacgcgcgtaaaaaggacgaccagcataaaagggaaacataatgcaaaaacggcttttgtaatcacaaaaaccctcctcgggaattcttcatctcatctgattatagtaaaaaatgaagaatcggacaatcgttcccctgctatcacaataccctttttcagcagtcttcaatcatctgtcaaaaaaaatgtgaatataaatccattgaaccattaaccagatgaaccgaattacctttcttcagccgaaaggatgagaaggtttaggtctttgtatctttgacagtttcttcctccctctttacaatgtaatgatagtgtttactatcatttttcttggatgaagaaaaaaagggggtcataccgcatgtattcagtgcgatttcaaaaagcggaagaatcgagccgctctgcaggagcaaaaggaatgaacctgattaaactgacgaaaaacgggctgcccgttcccggcggtttcatcattcagacgaatgccctgacacgttttatggaagacaacgggcttcaagcagatcaggaacagatggagcgcgccattatgaacggcacgttttcaaaagagcttcgggaggaactgaccgcgtcgttttatgaattgagagaatcatacgcctctgtcgccgtacgttcctcctccgcgtccgaagatcttgaaggggcttctttcgcgggccagtacgaaacctatttaaatatcaaaacagaagaagagtttctcggaaaagtgaaagaatgctgggcttccttcttctcggcgcgggtcagcggttataaagagaaaatgaacaatgacaccgcagaaccgttaatgggcgttgtcgtgcaagggcttatcaattccgaggtttcaggagtcattttcagccgcaaccccgtcacgcacgatgacggagagctgatgatcagcgcgagctacggtctcggagaagcaatcgtctccggcagcgtgacgcccgacacatttatcgtcaataaagacacatttcagattgaaaaagaaatcggcttaaaagaaatgtatatcgtttctaaagacgaaggcgtgacggaaaaagagacgaccgctgacatgagaaaccgcttctgccttgatgacgagagcatcaaagagcttgccatgctgacgataaagacggaagaactgtacggttatcccgtggatctcgaattcggatttgccgaaaataagctgtatctgcttcaggcccggccgattacaacgatcgcgcaggatcagaaagcggcagacgaagaacgggaatttatcatgacgccccgggatcagaaagagttttggctcaatatggaggccaatatagaaggccccgtcagcccgttattcgcctcactcattgtgccggctttggaatacggcctcaaagagagcacgaaggcattccctgtaatgggcatcgaaatcgagcgtgtcaaacttcatcagggccgtgttttttccagacagcataagacggacgacaagctgcccgcagaacagttagaagcgcttttccccgtcttggctgaccgcatgtacgatattattcaggaaacctttctgcctttttatcaaaagctggacgaactggcgcatacagaccatacgccggagactgcccttaatgcgttccgaaacctgcaagacttctatttaaaaggatacgcagaacatttcaatattgtctttccgcaggttgcgttaaacatgatactggaatccatgtacggacaggttgagaaagaaaacacctcccttctgtacgaaatgctggctggcgtcatgaataagtcattggagaccgacagacagctctggctgctgtccggacaagtaaaagacagccctgagctgcggcgcgtctttacggtttctcatgccgatgagctgcatcagacgcttctgcaatcaaataagggaaaacgctttctcgaacaagtcggtgaatttttacaggaatacggctggagatccgtgaaaagtcatgatctgattgaacaaacttggacggaaaacccttatttcgctttggccaacattcagaactatgtccggaacggatacgattttgacagtgagtttcataaaacgatagaaaaacgaaaacagctctacgccgactttatggatagaattgaagatgacggcttccgggagacgtttgaccgctattatcagtggacattgtcttcatccgtcatcaaagatgatcaccatttttatattgatgcgatgctggacgccaaagcacgcctttgccttctgaaaatcggcgagctgcttcaaaaacaaggcgtaatcgatgatcgggaggatatgtggtacttatacagcgatgaagtcgagaaagcgctggcgtcgccggttccgatgcaggaaaaagccgctgaacgaaaacagctcttccagcaatatcaattgcttgaagcccccgcttatctcgggactccgacttcggaacagctgaaaatggctgaacagattaccggctccatcacagaagatgaaaaaaacactgaacatcaaatttacggacttgcggcgtcaagcggaatcgcaagcggcccggtgaaagtcattcgtgacgcaagtgaattttcccgtttttcaacaggagacgtgcttgtctgcaaaatgacgacaccgctgtggaccagtctgttccaggatgcaaaggccgtcattacggacacgggcggcatcctgtcacatgcggcgatcatcgcgagggaatacgggctcccggccgttctcggcacacgtgccgcgactgacaggctcaacgacggagatatcgtcacggtggacgggacaaacggcaagattacgattgtcaaacgcgcttcatgctaggtttccctctttattgacgggcagggcgggtgtatacttgtcctgccagtatttacgcgaggtgaaacacgttgagaacgacgaacaagagaattattgacgccgcgatgaatctgatcatccaaaaaggataccgcgcagcgacaacaaaagaaatcgcagaaaaagcaaaagtaagcgaagcaacgattttccgtaattttaaaaacaaacaaggattaatgaaagccatgattgaacagcagacgccggttccggaaagcatgatcaccaaggcggaaggcgatttgtatgaggatcttcttcatttcgccgcgacccttcttcagcaattggaacaaaaaaaagaagtattccgcatctgcctgcgcgaaccggaactattcgaagacgtcctgcaggatattgtcgtatatccgcaatccgtgaaaaagcatttaatcgtttactttaaggagctgacaaagaaaaatatgataagccccggcagcgaagaagctaatgcagacgtctttatgacgatgattttcggttattttatacaccggctgcagctggggaaaagagtcatcactctctctgaggaaacgatgctgaaacacagcactgagattttcatgaaaggcattaccggccggtcattttccggctccaaggaggatgaaggatgggttcaaagaaagaatgggcgctgatcgtttcgcttttgctgggagccatactcgttcccatcaattctacgatgatcgcagtcgccctttcatccatttcccgctcattcagcgaatcaattgccagcatcacatgggtagtgaccgtgtatttaatcgtgatggccgtgacacagcccattgccggcaaactcggtgatatgtacggaaacaaaaaaatgtatttatggggcgtcggcctttttctcatcgcatcattggggtgcgccctctcgccaagtcttttcttattgattttcttccgggcgcttcaggctgccggcggcgctttgcttacgccaaacagcatcgccatcatccgccatgtcgtgtctgaaaaacggcttccgaaagtattcggctttttcggcctcggtgccgggctgggcgcggctctcggtccgtttatcggctctcttttaattgagagcttcagctggcattcgatcttttgggtcaacattccgtttcttgcaatcgcactcgtgacggcattagtgatgtttcctaaatataaagaagaaacgtctgacgctccgcttgatatcatcggttccgttttgcttgccggaagcattgtatctattattcttctgacgaaaaatgaaagctctttgggctattgggtgtacgcactgctcattctcgtatttgttccgctatttttcaggcgggagctgcgcacgaaacatccgattattgattttgatctgtttaaaaacacgacctttacgagcgccaatctgtcggttctgttaagcaatttaatgatgtacgccgtgttattgattatgccgctctttatgaccggccacttcagcatgaacacgtcgcacagcggcatggcgctgtcagtcttttctgttttcatgtccgccagcaactggggcggagctcagctgcatcagaaatggggcgcgcgaagaatgatttttctgtccttcgggctgatggccgtagccaatctcttattttttcttttggtttattcccattccgttccgtttcttatggcatcgcttattgtcggaggcatcgcgtcaggtgcggggctgacgagcatgcaggtatcttctcttgcgacggtagaaccgggcatgtccggcatcgcatccgggattttctccaccttccgttatttcggaagcattatttcttcagcgctgatcggtttaatctccgggtttcatattctgtttatcatattgatcggagtttctgtgatcggcttgttcgtatcgcttggtatcaagtccggggaaaccgttcagacgaaaaaaagccattcggcataacgaaaaaggttccgtaagcatctgctttccggaaccttttctagttttccttcttcattttctctctcaaagtgtcaccgcaatgccgtttgctctatgagaatcttttgatttacaagagaaaaggggaatgtaaatggctgagagttccgatcaagttcggcgctgacatcgtaatccggccgtaaaaaaaagcccggccgccgtgttgttagcggcaccaggctttttatatgtgatttttcataattaataaaactgaaagcttattatttccaatgttttttcttaatttttttcataattctccttactaaaacctacctaaaacaattattgaatattacttttataattaagcaaattaagtaacaatcattgaaggattctcagactgataaaatttattttaaatataatatttcaaaacacattcaaactgtacaaagaaaagaaagtctaaatttttatttttgtgagattcatctatagaagccactgttttgatcctccttctaaagttgagtcgcgtcactttagtagaatcataccgtggcttcccttgtcaaaaggcacagttcttttttacaccaactacttgagactttaacgtttctctcatttgaattaattcaaaatagaattaatgggggagattacccccgtatttccaggcgatccaggtgggtggcctggtaaatattttaagtctctgtatctttaacaatagtatttacaatatcattaggataccgattcaaaaaaaaatgttctcctttaaacttatgaaatttcacgtttccttcaacaacttcactccatttatgcatttcattgatatgagtcgaaaaatcgctatccgcataaaaaacgcttactccacaacttattttttctgctttgggctgaaacttataattgtccaaaattataaaatctgctcgcaaaatcggaagaaacatatccataatctcttttgtataaaactcctctggtattcccccatattgttccacctttgtcaagaaagtttcattagtcatattttcaatgtcttctctcttttcaaaaatatgtggagcatctcgcccagaaaaaaacagatgccttggttccttagttcccatttgcttaagtttataatatatctcataagtcaataaggctcccatgctgtgtccaaatataacatattcatcgtcatattctaattgttcacttattcttttggcgatatcttcacttgcttcaccaacagactggtaacaaggctctgtgaatcgagttcctcttccagccaattcacatatacacaattcatatctatccggcagcagttttttccattcataatatgcatttaccgacgctccagcatatggaataggaaatacttttattttatttatttcactcactcctatgttcaacttgagcccactatcattactatataaacctataagtattcaagatacatttaattgtacttctctatctctcgctgctctgccagcaacaaattcaccatatcactatagctattcataccgtctgtctgattatttgccttcagatatacatcatttacatttcttgaaatacttgaaataacaccctcatacttatcccggtactgctcattttgttctatatcatgctgcaccgccttggacagactggacattatatcagacgcctgatctggatccactttctttagctcagatatagaataatcaaatgctagaaaaaaaccactgtaaagtatcattggatcatcctgctgcttacatgccagatatgctataaaatttgcctcatcctcatgcatgaaaccactctgatgtgccaattcatgtgccatagtagcaggcaccaagaaaacgggcacattaacattgatattggattcataagtaaaagggacaaagataccatttatccctgcatgcgacattagctttgacatcacaactggttttggtgttgagtataaagaatgctccaaaataggatattcctttgataacatttgcatcgagaacactgcgtgttgtgcataataatcaaaaacctccggtacttgagccaaaagatcagtgtccgctaacttttcccttgccaatcccatttcaacggcaagcgacttactcaatttgaccagttcctccttgctgtagttctcttctttatattcggtataagacaaaaaagaatatctgtaatagtttattccacccaaaatagtataacaaaaatatatcacgctacagatcgtaactattcctagagcaccacgataaactaccatcctacgtacacctttactcatgataaccttgcgcacataataaacgatataaaatagaaaaagtaacacaaccaacacgacgagccattcactaacagaaaacttgacccaagaaggtacaaatcctactatttttgacaataacggatatacagacctactgtatttttccgcccaatcctgttggttctgcgcgtatattgtcagtatgtaagctataactccaagtgaaatcaacggtaatctcttaagtaaaagcttttttataatgtactccccctatccaataaatatcagatgtacgccatgtaacctagtcatatcatttctttatttcaacatacttttcctcataaaaatcatgcttattagaaaaaacatattgattcataaaatctataggaagtacttcataagcccagtaggtaccattaggtctattacttgaaataacttgtcgggcgatttcagcagccactgtacccgttaactctgaactcgtttccatttgtaaattcaatctgcacctaacatcctttccatttttcactcctgtagcatcaatgactaaagctatccattcctctttaggttgctcctctaaacgaatatctagttttttcagggcttcttcaaccgaagactcaagttgcatttgataaaattgcattgctaaacgaaaaatattatcatttgctgctatattgtaccagtggagttcttgtaccgaactaacttccagaatatcaatgatctcttgacttaaatacggtttcttatagacagggacatccacttcaggtacaaattctttcttcatcatatttatattttccgtttttacacaatgatcactccaataagaatctgtttttccaattacactatggccactcattaatatatctgagatagaagttttcgtataatgttccgcaccaccaatataacaattcacatacttcgtttcgtctaataaatgatttattactcgttttaatagcagacctgtaattccaggacaaaaaccagctcctatgtaatttacaccgttagctttaagctctatttgctcctgactcaataataaagcattggaagcatcgacatattttgctcctacttccatagctgcctgagcaactctatctttaattataaattcaggccctgcacaattaatgacaaccgtacaatcagtacagaacgcaatcaagttctcccagtcagaaacatccagtaattggtagttaaaattattaaggttcattaatgctgtaggttcacgccgctgtccgcccttaacaataaagtctttacataagttcttacagatgacttcaccgatcattccgccacacccaacaactgcgatttgctccatccgtacgacacccctttcatcttatacaagatttaaaatacaagactagttatacctttctctattaaaagatcattattatgtctactcaacatactcaatgcataaaatctttgtttggcttccattaatttatgatacgtgccatgttcttcaattttcccattattcaataagacaatttcatcatatccactaagaattgattcatctagcctatgagtaatggaaattctcgtaatgccctgcatttcacttaacatacactcaaggtcactagctgtttgattgtccaacgctgaagtcgcctcgtccataagtaatataggtgattttctcaggagtgctcttgctatagaaattctctgtttttccccacctgaaaaatggattccattttctccacataatacatcaaagccgcctctgtcatgaatcaatttctgtaacatactcttctttattacttgctcaaactcatctgtgttacattcacgaaacaatttaatattttgttcaatcgtatcatcaaagataaaacagtcctgatgaataaaactaacgttttggaaaatggactgatcacttattttctcaagatctaccccgtcatacctgatatttccttcatacccatcataaaacccagtcaacatctttaataaggttgtctttccactcccacttgttcctacaatggcataagactttccatattcaaattcaaaattaatatcatctaaaatttttttcccatctacgcttaacgaaagcccatttagagaaattttattactgaatttagggatatcaattctttgagtttgatccgtttttgcctctccaattttattgaaattcattaataaagcccgactggccttccttttggtaaaaccggttatgagtctattaatgggaactgttacacaatttaacaattgaataaaagccataatctctcctactgtaatttctcctttcattagctgctgagtacccacaataaatatgactacagcaacaagaaaagttgaaatatcagtaagtgacataatgagtgacaacagattttcgtataccatttttgctttttcctgcttgttcgcctttgcctttgccctttcaaaaatctccttttcgatgttaaagctcttaacaacctgatttccagacaatatatctttaatgaaagatacataatttttattttgctcagccacttcaccttgtgctttttgcatacgattattaaatatactcgaaactgcaagtggaatgatacaagtgagtaatatactcaatgcaaggaatgaattaatgataaacatcgcaagcactccacctacaagcatagctagctgaacaaatatttccacggtcccttttatataatcgttttgaattatcgttatatcatttgacaatcgtgatatgtaggttccattactctccttgttgaaacttctcatatctaaccgcaaaatattttcaacaagggtatttttcaggtttaacgttgccctttttgtatataaatttttaacagcataccccacatacattcccactgcacctaaaggcaataaaataacggaaacagtagtcaccttaatgatattgtcaatatctttattaatagaataatcaataaacttttgtagtataattgccaatgcaataaacagaatagatgtcatgataccaagtaagcaggacaaaataaataagcctatattctttttgtatatgctttttgaaattttttcattcatactctaagcccccttcttgtttctaatttcatttagagcatgtctaatttacactccaattgtttattgctagatcatgtgcatatttcagatatgttgggtgggaccgcgagcatatgcacatgatctggcatcatatgtctttttatgacccctccacccgcatagcgggtggttttacgggtaagatacaacattaaatattcttcatgacatcattaaggagctcttcttcaattgtaatgcctgtaatgcgagcaattagagtactattttgaatgtaaaagtgcatgctaactccaaaatcttcagactctataatctgtgtttgtaaaaacatcttctcaagtgatatgtcatctctacttgcaaacttatcaaggactccctgataattaatgattggaatgcggtgggacatttcattaaaatcgtacttttgtgctataagaaacaacttttctgtaattgcagattgattaatactcgatttttctgatgttgataaaagctgtttttgcgttttacttttcctatcataaattgaataatctaaatttaaagttagccccaacatttccttattgaattcatctctgttatgtgtcaaaacagaaacagggatgttatttaattcttcaggtaagtcactatacataagccttgatataaattctactgctgtattaatgggttgttcgctaaatttctgatattgtaactcatttagttttacatgaatttctgtagacctcttagtgtctcgtcgagagaccaaatcagctgattgtttagcagcttcaatatactcttccatgttagactcttgagcatctggaatttccagttcgtcaactttctttttaatcattttgcaatattctatgaaagaatagttatagggagtggtaagtctgttgttcaaagtttcatgaagcataaccttaaacaaatcttgtgagactccatcccatattaaatgatgaattgcactaagtactaagcaatgatctgcatctatttctacgattaaaaatctagataacagcttatcatcagttagaaaactcatttcattcacaatttctttaaattgttctgcagataattctaaggttcctttcactactggaatttcccactcatctgaataatcgtattcttctaaataggtcattttttgatttaatttcgttcttaatgccccctgcctggaaattattcctctgagtgataaagaagcgttctctgccgttccttctattgttatgatttcagtaataatttctgtatccggtcgcaagaagtcctcctgtcctgtcaatacaggacattctaaagtagaacgtgttttaatatagttatctccataataattcaactgtttttgtatcatgcactttagatcgccatcacggttatcaccaattaatgtttcatctaatggcatttttactgttccttttctggttaaacacgtttcgacaacatccttaattgctctttcatatgccaataccaatgtttgagcatcctcgtcagtatacaatccagtatcatatatgatgtcaaattcaagttgcccatttaaaacagccccatttagagacaatcccattcctgatgaatttttttctgacatacttcttcctaatggcattcccgacatggatattccttcaattctgtctatctcgttatccaattctccaagataattgaatgttattgctgcgctcatctcaagtccgctatgctcaccaagatatctcaaaattccatatccaattccatgattagggacctgtttcaatgtttgttttgcctccaaaatgctttcttcaacagtatcttttgtctccaaaataataggatatacacttgtaaaccaaccaactgtacgatcgatggcgatctctctatctattgtctctctcccgtgaccctccatttctatggttaggtacttagagtttctccattcttttactgcaatggtcagcgatgccagtaacaagtcgtttatttctgttttatatgtctttccagcttcgagcaacagctttttcgtcgtttcagagtccactttcactactttatttttatattgaccacttgctgtttgtgtactcttgaatgtctcagtactatttgatttatccgatatatttttccagtatgctatttcatctgaaagcacttcactcttagcatattgtgttaaagcattcgcccattccttgtacgaagccgttttcattggcagcgtgattttacctgtctcttgtatttgtcgatatccactaaataaatcctccagcagaattctccatgatacaccgtctatgaccagatgatgtacacaaattagtaaatgatctccactgtctgaatggaacagccctacttttactaaaggcccggtggctaggtctatgcttgcctgtaatttatcgctggcatactctatctctttcgatacatcttgcacttttgtataatctttttcataccaatcatatagcttgctttcctctgtagacagcgtgatttgacgttgtccgtcatatacatttcttaaagcgtcatgatgtttaatgatttcagtaattgctgtctttaaactaggtatgtcaaatggctcatcacttcttaacattaaggcctgattataatgattaggtacgacgtgattcttattgaaaaattctagttgtataggggttaatggacttgccccattgatttctccctgttcgtatacttgatttacttctcccatttgaatattttccccaatctttcttggggtctgctgatacattaatgcggcgaaagaaagcttataacctttttcccgtaacttcgaaacggccttaatcgctttaatagaatctccgccaagttcaaagaaactgtcttctattccgactggagatattcctaagatttcttcaaatatgtccgtaatgactttctctgttttagttcttggtggcatatattcctgtcctgctaatgcatttagttctggcagtgcttttgcatccagcttcccatttggagtcagtggcaaggcatcaatctgcatcataaagccaggtaacatatactcaggcagtttgtctctcaaatcatttttgatttcagacatatccagttgctgctcttgatttgtcgggatcaggtaggcacatatactcttgtcaccgcctacttccaatgcaacaacggctacatcagatatacccggctgattccttagaacgctctcgatctcgtacaactcgatccgatatcctcggattttaacctgttcatctattcttcccaggtattccatctctccgttaggcagccatctcgccaaatctccagagcggtataacttcccttcgccatatggattgtcgataaacttctccgctgttaattcaggctggtttagatagcctttggctactccgtctcctgcgatgcatagctcaccaggaacgcctacaccacataactccatctcattcagtatatagagctgcatattggcaatgggatgtccgattcctacacttaaacccttatctttttcgctggaatagacatagtcacagcatcctacagtagtctctgtagggccatattcgttatggatcttgacgctttcacccaatagcttctgcgttttccacgccgtatctgtggtgaactcctctccaccgacaatcagcgtttctaaattcggcacatctacgccgtctgcataggtttccagcatttttaaatgtgacggggtaagcttcaggaaggttaccctgttatcttttaaagctgcacgtaacctttcctccgtatctcctccctttaatagaagagatccaccactaatcagcggtaagaacaaggacgttacggagaggtcgaaacttaagcttgtcattaataccgtcgtacaagcttccttctggtattcttgatctgcatacgacaagtaatgatccaagttacctcgtgtaaccgccacgcctttgggctttcctgtcgttcctgatgtgtaaatcaaataggctatgtcacttttttcaacagcacacgctggatttgtctccttctcacccagatcttcaagattcatcgagatgaatgggacttccgtttccatagtcttctctcttgttaaaatgaccttgggtgctgcatcgtttaagatatgctctattcgttccttcggagtcgctggatcaatcgggacataggaagctccactctttagcacgcctaaaatgccaatgatcgtttccgctcccagtgaagccatgatggccactcgatcattgggctggacacctaacgaaatcagttcccatgccaatgcattggccttgcggttgacttctccataacgaagtactcccgtttcgtattcgattaccgtcttctcgggtgtctgttccgcatgtttctcgaatcgttccactgccgtatgatgctgtgcatactccgtatgctccgtatgggtattattgaaaaccgttagtattctttgttgttctacctcactgaccatgtgtagttcagacaatttcatatcagggttagcaatcactctatccagcaataccttaaaatgctccagtatgacctgtgctgaagtctgggtaaataaatcactgcaatataccagatctaaagcgtacccctcttcatgcgctgtcgcttgcaaatccaaatcgaatttggcatcaataaaatgaatgcccaacatgtctacttgggcttcgcccatcgcaagatggatatcttcgtcattctgcatggtaaacatcacgtcaaacagcggattgcgtgacagatcacggcgtacttctacttcctctaccaattcttcaaatgggtattcctgattctcatacgcgtttaaggccagctcttttatctcgcttaaaaactccaggaacgttttctcgccccttggatatcctctcattgccagcgtattgacaaacatgcctgcgatcgtctcggtgtcctgatgcaccctgccggagatgggtgttcctaccactatatcttgttgcctgctgtatttatgcagttctatcataaatacagccagtaaggtcatgtaatctgtcgttccattttgtttatttatattttcaattccaactttttgttctttactaagttgaacagacacttgtgctcctttgtaactttgggttttcggacgtggatagtccgtcaccaaatccaaaaccggtgcctcttctttgaatacttctttccaatagtttctctgactctccaggtttctgccacgcatccattcactataatccttgtattggatttcaagtggttgtaattcttcaccgttatacaatcgtgagaaatcttcgattaatagattgagcgtctgatgatcggaaataatatggtgcatatcaaatagtaaaatatatttgttccgatttctttctttcactactttaaaacgcatgagcggtgctgttccgatgtcaaacgggcgtacgaattgttccatgtcagcgtcactgtagctgtcggtctcttcatattccacttggtagaatacctcgtctgcaatgacttgaagggtttctccttctgtcatgacaaaacttgttcgcagcgactcatgacgctggatcaggcgatctatggcttgttgtattttttctacatcaaggttacccgttacttctagcgctgacgccatgttatatgctgtactgttaccttccatctgatccagaataaacaatcgtttctgtgtagaggatgctggataagcttctctctgttctgcttgtggtattggactatattcaccttctcccgcggcctcaatctttctggccaacatggaaggagttggtgaactaaatatctcttttactggcaaacgaattcccgtcttcttctcgatggcattaatggctgccgtcgcttttaacgaatgtccacccagttcaaagaaactatcctctatgccgactggagatattcctaagatttcttcaaatacatctacgattgcctgctccgtcttattacttggtggtacgtagttcaaactttctaacatatctggctctggcagcctagttttatccagcttcccatttatggttagtggaaattcatcgatctggatcataaaggcaggaatcatatactctgttacttcttctcttaccgcttctttaatttggggtatacttagttcctgccccttttctgcaatgagatatgcacagagaatatcatcatttccaacttcttttacaataacgacagcatctgcaatattactctgctttcttaatacactttcaatttcacctaactctatcctgtaaccacggactttcacttgttcatcatctattcgacctaaatactctatatttccatctggctgccaacgtgctaaatctcctgtacggtacagttttccttcaccgaagggattcttaataaacttcttatctgtcaattctggctgatttaaataacctcttgctaaaccatctcctgcaatacacaactcaccaggtattccaatcccgcatagctccatttcatttagaagatatacctttgtatttgcaatcggacgtccaatggaaattgaagtagagtctgtattcactctaaaactagttgcatttacagtagactccgtaggcccatatgtgttaagcacttctactctttccgcccatttttttaagctttctagactacctgcctctccacctgactccagcaaacgaagcgtcggtaatgcgtcaacacacaacccgtctattaacttaggtgtcaatgaagctgttgtaacattatttcgatcgatatatttttgtagttgctccatatcataggttaaatgttttggtacaatgcataatgccgcaccattgcatagtgcagggaagatatctcccaccgcttggtcaaaagatatatttgcaaattgcagcaccgtatccttgtcgcttagtgcaaatgtctcctgatatgtgacccacatattgaccacatttcgatgttcaattaaaactcctttaggatttccagttgtacccgaggtgtagatacaatacactaaatcattagacctgttaacgtgcaaaagattgtccgtttcattagcataattattctcatcttctaaatctaatactggtatctctaccttccctggcagcttattcttatacgtcaatacaatctttggactactgtcctccagcatatagtgaattctattatctggatattcaggattgatgggtacataagctccccctgccttgatgatggctaatatccctacaatcatttccatgctgcgttctgtcactagagccactagatcgtttggagccactcctaaatcccgaagagttcgcgccaactgatttgctctttcattcagctcggcatatgtcatcttattatcatcaaatttaagtgcaatatttcctgctgttttctctacctgattctcaaataagctgacagctgtttgttctcgagagtattctacattcgttgcattgaaatcaaccaagatcttctcttgttctctgagatcaagcatatgcagatctttaagctttttgcctggatgtgttatggcttcctcaagcagcgttacataatgccttgccatatattcaatcgtttcttgtttgaataaatctgtgcaatactcaaaatctatctcatacccttctggcatacattcaaccagaacggataagtcaaactttgagacatttcttttaatgaatgcactttttccgcccaataggccttgcatttccgtcggttttttcttttcttttaatccgaacataaaatcaaaaattggatttcttgagagatctcttttctcctctacggcttcaactaaatcttcaaattggtattcttggttatcataagcctgcagacacttctccttcacagctaatatcaaatgctcaaaggtctcatccggactaacttctcccttgatcaccagagtattgacaaacatccccaacatacccttagtatctgcatgaactcggcctgacacggtagttcctacaataatatccttttggcgactatatttggctaataataaaatgaacacagatagggtaaccataaattcagtagcaccatgctttagagctagatttttaacccctgagcttaatggctcctttacctttgctacaacattgtctcccctgaaagactggatttgaggacggaggaaatccgtcttcaaatccaccctagcaatttcaccagcgaattccctcttccaatactcttcctgttttgagatgtcataaaaattctgccatacactgaaatctttatactgaacacggttagaatttttattcataagttctcctcttattcataatcagttccatcattttcataaaattcgttcacttgttgcagtataactggcaggctttctccatcacatataatgtgatgaatatcaacaaatagataggaggccgttgttgtcttcattaatttcacacgcatcaacggtgcttcggataaaacaaacggttgtataaatttatcgtattctgtttgtatatctatttcgtccacttcgctgtagtctattaaaacccttgcgtctggagaaatcgtttgaataggctcaccgtccacaacatggaaactagttcgcaagatttcttcttgctttaacagcttatccaaagccttctgtaatctttctttatctagcggttcttcataagcataaacgtccgatacgttgtagttaatattaggtccggtcatctcgtccagaagatagagtcgtttctgagctgaacttgtagggtagtattcagctgctgaagcttgttctattgccacaaacatctcgctctcaatcgactcgatatttcccgctatctgctcgggcgtaccaaaagtaaaaacatctctaattgacaatcttactcctatggccttctccaattcattgcacaagagcactgctttcagtgaagatccccctagatcaaagaagctatcagttacactgacttgttcaatatctagaatgttctcaaatgcctgcacgatcagagtttcatattcatttcgtggtgcaatatattcctgtgacttgtactgcggctgtggtaatgaggctttgtcaagtttcccattacttgtaagtggaatcgcatcaaccgaaataatatgtgcaggcaccatgtaatctggtaatactttacttaacttgatcttaacgtccttttcttctatttctgtctcagttattacataggcacacaggaatttctcattccttttgtcttctcgcactatgactacagcttcatttatgctttcaagctccaataaacggctttctacttctcgtggttcaatacgatatcctctgatttttgcttggtcatccatccgtccaatatattcaatgtttccgttaggtaaccaacgtgccaaatcacctgtccgatacatctttccggatccaaatgggttgtgtacaaacttctcgtctgtcaggtcttgtcgatttaaatagccttgagatacaccctcacctgttatacatacctcacccggaactccaattccacaaagttcatttccatttaatatataaatctttaatgttggaagtggcattcctatatcgctaattcctctctcgatggcttcagcatcaatatcgcgataagtagcgtataccgtggtttctgttggcccgtacatattaaccagacgacaatgtctattgttctcatgccatttcttcaaatgtgctggataaagtgcctcccctgcaaaaataacatatcgtaaactatttatggtttgtcctgtcgttgcatcgatcaacgcatagaatggtgaaggtacctggcataagatggttaccgcttctttttggagcagctctccgaaggcatatccatcttttactgtatcctcagaaggtattacaagctttgctccattcaatagacttccgaatatttcccaaaccgaaacatcaaaacaataagaatggaattgaacccaaatatcattttcatataaatcaagcttaaacttgtcattcttgagtaatcgcactacatttacatgctgaaccataacaccttttggccggcccgtcgtacctgaggtataaataacatacatcaaatcacttgagtgatttacatgaacaaggttactgcattccatttgataatttgcctcatcatgaagatgcatgacaggaatgtcaacttcaggttcttttgtactgcataatacgacctttggtttacagtcattaatgatataattaattctttcctctggataagatggatcaaccggtacgtaagctgctccagcctttaaaatagcgtatatacccaccaccatctccaaacacttctctgttgagatcaccacaaagtcattgggttgaatgttatagtcctcacgaagctttcttgccagagcattcgcccgttcatttaattgtgcataggtcatctgttgtccattaaatgtgatggctatactattaggtattctggcggcctgctcttcaagtaactgcacaatcgtcatattttgagggaattctgcatccgtcatattgaactcacccaatatttttgcttcttcgtacagatctaccatggcaatctcctgcagcttcttttccggagacattaaaactccttcaattaatgttaagaagtgttttgccatgtactcgatcgtttctggtttgaataagtctgtagaatattcaaaatcaatcttatagccttctgaatcacttatcatggttaaggtaagatcaaatttagaaatactaccttcaacggattcccttgttccaatatgaatacgatccgaataactctctctctcatcgtcctgcaatacaaacatcacatcaaatactgggtttcttgagaaatctctctttactcccactgcttcaactaaatcctcgaactgataatccttgttatcgtatgcctgtaaacatttctcttttgtacgtaataatacatcctcaaatgtatcatcagcgcacacattccctttgattgccagagtgtttacaaacatgcccaacatattttgggtatccgtatggtttcggcccgatattggcgttcctactataatttcttcctgtcgactgtattttcctaacatagagaaaaaggtggataacaacaccataaactccgttgcaccatacttcttcgctaactcttttactttaatactcgttttttcttctacctgtgttcggaaattagcacctctaaagctttgtttatgagggcgtggataatccatgattaaatccaggactggtatatcaccggagaattctttcttccagtacgctgcctgttctgtgatatctctagcattttgccaagcagaaaagtctttatactgtactcgtggtgttaacaattctcttccttcatataactcttgtattttgtaaagcataactggcatgcttcctgcatcacataaaatatggtgaatatccaggaataaatatgaattacttggagtattcagtatttttgcacgcattagtggtgattttgacaggtcaaatggttggacgaaagtattatattcatcttggatatactgtgaatctgctgtctttacttcactgtgctccagcgcaattcttgcatctgaagaaattttttgaattggttcaccattcacgatatggaaacttgtccttaaaatttcctcatgctctactaattgatccaatgccctctgaagtcgctcattgtctggtttaactttaagcttgattactaaaggaatattataagttataccagggcctgttagttggtccaaaagataaagtctcttttgagctgaacttatagaatagctttctgcttctgctatttctggtatttcttcaaacgtattctcctttgagttttttatttgttctgcaatattttttggtgtaactaaatcaaaaatttctctaagtggtaaccttacccctgtgctcttctctaattcattacacagccggattacattaagcgagtatccacccaaaccaaagaaattgtcatttacacttactctttccataccaagtacatgttcaaatgcctctactaccaatttttccgtctgggtctttggtgcctcataaccccttatcatcttagtttcttcaataaactgttccgggttcggcaataatttacgatctactttaccatttgcagatagtggaatctcatctacctgtatgaattgtgccgggatcatataatcaggcagatgtttggctaactctctttttatttctgccaattctacggtctcatctgcaacaatatacccacacaattgcttctctccatgtgaatcactgtaatcagcgacgacggactgctgaatatgtggcaaatgattgatacagtgttctatttctcctagttcgacacgatgtccacgtatcttaacttgactatcttttcttcccaggaagtctacatatccttccggacgcatgacaccataatcacctgttttgtacagataacctaatctatggttgataaaggcggccttcgtcttctcttcttcattgagataacctgcggcgactccttttccaccaatatgcagttctcctggtacgcctactgggcattcttccccacattcatccagtacgtaaatttgttgatttttcagcggatagccgtaagggatacttttccactctggcttcacttctgtgattgggaaatatatggaccatatagagccttccgttgctccacctaacccgatgacttgtgcttttggcattcttgttttgattttcgctggcaaaccaagagaaatccagtctccacttagcatcaccatacgtaagcgctctgctgaagtgctatgcaccgtgtcttgctttgtgctttctagatacatatccataattgccggaaccgaattccaaatcgtgatttcttcttcgatcatgatctgatgaatactggccatatctaaaagatctggaattaatactaactgagctccgctaatgagtgctccaaaaatatcatagacggataaatcaaagctcatcgatgatagggcaatgattttatcttcgctatttacttggaatttctcattaatatctaataatgtattcactactgcttcatgggtgatcacaacacccttaggatgtccagtgcttcctgacgtatagatagcataggctctatcctgctggcagccttctaacagttctaaggcgccatcgttataggtggaaaggttctctgtttcatataaatctggatgaatcatgagcttgatatcactatgttccacgatatattttattctttcctcaggatgttccggattaacaggaatataagcatggccggcttttaaaatagctaccatatttacaatggtctcaattcgtctctctgcccaaactccaatataagaattgagtgcatagttttgttctgctaaataacgagcgacctgattggattttctcgccaactcgccataggtcaatgtatcctgtcctaatttgactgcaatagcatcgggagtcttctggcattgctggtctattaatctttgcagtaaatccccttcataatctccttgtgtacgattgtaatcaagcagtagttgatactgtgttacaggcagcggcatagatgaaagtttattgtctataacttgctgtaatcgaagttgatacgtttcaaacatggcactgatcatgtcttcatcaaacaaatcttttgcataatcccaagtcataattaattgtccgtctctttccgtgacttggaaatctaaaaatacttgaggggtctggcttattccgtatttaattttccctaatttcgtcaacgtatctgcaaattccgatttatcgaataacatactagtaaatacaattggcataattgctttactagtcatttctctcttacttgcaatatttcgtataacatcaacaccactataaaaacgatggtctactgcttcaaataatatatcttgaaccatagatgctttctcccaaaaagcacgatgaacagataaatcaatatctaacaataaaactgatgtaaaatctccaatcaacttcattacgtcaggatgaaaggtctgtcgattaaataatgttaaattaagtgccattctggattgattgctccatttgcacaaaacttccgcataaattgtacataagaatacagatggtgttacaccgtactgagttgccaggcccttcacaatattccattgatcagttgtcagacttttctccattcgctgaaatattggtttctctatgaattctggctcacaaactaatggtagctgaggtgcatagggaaaatcctctattttggcttgccaatagtcttgagctttttgataggcggaagattcacgaaagctctccaatgcccttacataatctgagaattggaatgttaaaggtttaatctccatattcggtttctcataataatccattatctcttgtattaaaattaataaactgcctccatcagcaattaataagtcaatatccaggaagagataatttttcttctcaccaagaataaatgcagtcaactcaaataatggccaatgatcttgttggaaaacaaaatgtgacctgctatttcttttttccaatatacgcttttgttgatcctctaaagacaagtcttgtaaatcttcaatacaaatctcataagaagacttagaacgccgaactttttgcattcctgtctcatcaaaaatagtacgcagcataagctgacgctctaaaacatgattcaatgcatcgtttaagcgtttaatatctaattctgtttcaaactcataataggcatgggtggagacattacccatttccataatattttgtcttccaactaaataggctccttgtatttctgttacctggaacggctcataccacatgtctttattccctgttaattcggatgctttgacatcctctgcctttagttgttcctcaaccatcttaattatttgttccagggtggacattttgaaaaggcttacaatagggatttcgacttgaaatcgttgatttatttcatcctggaaacgaatcaacgttaacgaactaactcccatccgagaaatcgtatcgtctactttcaaagaagggatagagaatacttcttttgcaatttcaacgatttgattttcaatctccgttttgttccatgctgacttctttgcagattccttgatactctgataagaatatggagctattgcgataacttcatcaaactcatgattctcaaatcgctctattaaaagaaaacgttgcacctttccacttgttgttttcggtaccgtttttattggaattacataatctgcagctattccaacccgttctaataccatatcctgcacttgatgggcaagtggcaaaaatgccttggcatcttttcgattatgtacaaatactataatttcatccctgatcgatgacggattgcgaacaccacacacaacgacttgagacaactctgggatcgccaatgttaacatattttctatatcgctagcataataattctgaccatttacaaacagaatatccttctttctacccattacaatgagttctccattgcgtaaaagtcctaaatctcctgtacagaagaagccctgttcattaaaaggggaactatcatgattcatatatccctcaaatacatttttccccttgatcactatattgcctatgtaattttcccctaagatgtggtcttcatcatctacaatcaatatttctaattcatataatggttctcctactatggcaaactctgctgcatttggctccttcgtttctatatactccacttcttgaccaatacgagctttatgacggttaatacatacacttctattatggccttcttcaggaatagtaacagccagactagcttctgccataccatagacttgatggatcgtattttcacgcaagccagaagacgagaatttttcataaaatcgtctaatggtatccattgatattggttctgcaccacacattatgtttcgcacactagataaatcaatattttctaaatgtgaatcctttacagtctttatcatccagtctaatccaaaattcggacttacaagcaccgttgcttttaattgcgcacatttttgaagatatagccaagatttctttaaaaatgtacccgaatttagaagggaatgagatatacccgcaaatatcggagttaaatgataaccgatcaagcccatatcatgtgtcaatggtaaccaactagccatgacatcatttgtgtctagtttcaaacgatctactatctgtgccaaattataaactagattttcatgtgttaattttactcctttagggttacctgtgctgccagacgaatattgtatatacgctaagtcctgacaatctactgtaacgcattgcccctcttccatattacatgctaaggtttcatactttaagtatttcaaattattggcttcataactttctctaaacgtatttaaatttctttcatcagtaattatccacgcattcggcaactgctcacttactttcactaacttcttgaaagcttcagtgtcaggcgatgcaattagcggtacagacagaggaacggggatcatgcctcctaaaatacaaccccaaaacaaccttataaaggataaattattgtttgtctgaaagataatataagagcccttctgaaatccctgcttttgtagtgcccctaagatggatttggcattaaaataaagactttcataagactcaaacaattcagagccatcggattgagtaaagtaaactccccttgatttctcgttagcataaattccaagtaattgatctagtgttatattaactccatcctctaatactgattttgtatagggtttcatattgcacctcttaaaaagttattgtttttatgctgcgatattatctttgttacaattgatgcaacgtcttgatcttgcctctttaatattaaaatttatgttgagaattatttatgtatattggcttctataattctattatattatatttaaggattatatcaacaaaattcttaaaatttttccagttcaaagggcgtggtttaaacccaccgcccttagccttcgggttggatagtaataatcagaatcacttaaaaaaacactcaataatgcccccgttgtcaagacacgattttttgaggaaaaagttatgtccttcttatcatgtcatgtagcatttcaggatgcgatctgttctcaatatatcatttttttacattttccaatttaatagcgtgcagaaaggcaaacagcctctgcacgcttgtgtataaatcttaaatttcaacttatatcttatatcatacagcagtcattttcttgatcatccagacggtgccacatcaaatgctcatcggtttcccttgatagtcaacgaaaacaaattcactatcgatacgaacttgtcgattaatgagattataaatatcttctgctgtttcttttggatgtgtcggggctatcattcctcctatatccgtccttacccaccctggtggacggaaaggacttgaatgccttcattctttgctacatggagcttctcggacaacatatttaaggcagctttcgacaatccataaggataatcaccactatatgcatttgttagactaccaccttctgacgagatgttgataatggattgattctcaccctttttcagcaaaggtagaaaatgtttaatcacacgggctggtcctaacgtgttgacatcaaatgctagtttgatagcctctatatcaagatcctcaatagacgtacctcttccattaagaatggcagcattattgataatcacatcaagactttcacctacattacgagctgcttcacgaacagattcctcgtctgtgacatctaaatgaagaatttataactggttgctatttttctcttttaatttggttaattgagtccttttttgttcattcgcatctctgactccagcaaaaactcggtaccctttttctaatccaacttcgacaaatccaagccctaagcccctatttgccccagtaattaatatatccaccataatcctcccagatttttttaatagttattttacggatgcatgtgatagcaataggtaagactttgatgtaatcgccatcttttcccctgctccgcacccaacgtgcgattttcaccgcattgggcgttccatcttattcttttatgctaaagtaattctacaaatttaaggttccatatcgcatctatttgagtatcaaaggttttaatttcataatataaattataaaaaaaatgaacaaaactaatacaatcctattctacctttacttaatctaacaatttcagttcaaatccacagttacatttttttaatgtttttcttatcggagatatcttactgttacatcttgggcattcattaaccaaatacaaattatgtatgggacaaataacattaactgtatagttccaaattttcttctgataaaaattcccattaaaacaagctgggcaaattttatcagcatatgaattaatacctaacttaaagcccgtccttataaatccaagattagtggtatccataattttatcattaaaagtcatactccataattctctttcagtaataccagtaatgttgctcagtaactctaaacttatcttacccgcatcacctctaacaattttctttttttatctgagccatagtatatatccaactcgaattttcataaccattataatcagttattcttaatatatattctgctaaagattcatcttctaaatgttttggagttagcaataacctttccaataagccatacctctccttcatttatttttttattattcaaaataaaacagctaagaaaatataattttcttagctgttttactttctaactgattttgaaatctagtttaggagttcttgaaactattccgaataattatgaaaaatcacatcataatgctgtcatttcttcgtgctcgtgttcatcctgcacgaataaaatacctaattcatgatgttcgccttcataggacgcgcgctgatcaaaccggatctcaccgttcaggccgatgatctccatttttacaaatgcgcggtttttttgaagtgcttcataaaaatccgacacatgcttcacggggatgccgtttactttcgtaataacctcaccgatcttcagctcaagatcgtccgcgggtgtattcggaatgatgccgagcaccattaaaccctgatcccgcttagagaaataaaacggagccgcgttatcgttcagccgctgtctcaatgataaaaacaggcgtccgagcaccgcaatacaagcggcagctccagcaagcggagtccaccaaagggccgctgccccgaatgcggtcacgataaccccgagaatcatgacacgtttcgccgttatccttatgctgacttccggaagtgacccctgcacacgctgtccgaagccggcgatataaggaatccagatcaaatggaaagagccgcccggcacggtaaagacaggccaccaagaaaggtgtgactcaagcccgctgcccggcaccaataagaaaagcggaagcagccatgcgcgattcgccaattgtcggccgatgggcaggcctctgctgctgacgacaagcgccggagatgttttcagatgcgctgaacggcaggcagccgctccctccgtgataatcaaaaggcccataaacacggccgccgatgcccaattcacgccgaatgcctgcggaaaccgatccgcaaacggcactgtgtgggtatactgaaggataaacgcaatgaacatgccggcgctgacaatataagctgaggacagccaattcatacggaacgtcagcgaagccaaagccgtcacagccgcgattatgccgagaagaccgaatggaatagaaattcccagtccaaaaaataatatggagagaagaatacccggtataagtccttttatgtatgtaaagataagctcgtcatacatatccgcgatttttgtatgaaacgtatggcgttcacgtttgatccgcaaatatccgcatgcgagacttatgatgataaaaaaccagaacatcgggtgcaaaaaaaacagaccgatacttttcagaagttcaattccccattgaacagacactgctttcaccgcctcaagccaaacattttaattctattctaccaaataatcattggcttgaatatctcaaacgtctatctctcttccgtcatccacaacgttacatttgagagagagaaatctttcagatagtggtcaacctccacctcgatcacgccgctgatcagaagcatggaccgcttaatatccgtcagattaattcctaaacgtttatggtttttcattaagtaagtgaaataatgcttcgcacactcttcattgatttcgtgaacgcattcaacatttgtgtaattgaccaggtatctgctgaacagcataagaagacttagtgcttttgttgatgaaaatgtgacgtcttttgttctgtcttttagttgttccactaattcataatattttttttcacgcacaatacttgccctcttcaattgtgaacccccatttttttatccagataagcacgggtgattacagctgccgtgctgaagcgccgcaaacacttctgctttcgatactgaaatgcagctgccaaactaaaactgttctctattagaaccttcttttattgtaagaactaaaactgactgaggcaactttcaaaagtttcattttgaatacatattaactcggcataaagtctctcttctctataaatatcgggtaatgtttgtcctttataaatgtttaaatgtgaaaatttttttaatatcttgtcaaaaccgacataattatatgtctttcagttcatttttagagtgtgacaaaagaaacaggagacgtaaaaaacgcctcctcttcatttattttacaaataatgattttaacgccatttgcagctgtaaatcatttttttcgtcagatttcttttcattcatcagctgattcattttttccgctgtctttttatcaatgaccgctgttttatcaagcttgtaccggtcttgaaacgccagaacggcttttttcattgttttgctgaaatagccgtccgctctgcccgggtcgaagcctaggcctttcagcaggatttgggcgtgtttgacatccgcgctgttcatatcaggctgaagcggctgtttcagctgaagcggtcccgccgcaaaataatccggctggctcacggcgattgtcggagcaatgccttttttgtggatccaattgcctttcggtgtcagccatttgtaaagcgtcaatttaatgttgctcccgtctcccataggcacggcctgctgaaccgttcctttaccgaaagaagtgtcaccgacaacgtcataatgtcccgcttcttttaacgcgcccgcaagaatttctgaagcggaggcgcttcctttatccgtgatgacattgacgggatacggcttcttatgttttaaggttgagaaatattgttttttatcgccgttacgctccgcaatttggatatacggcatgtcttttgtgatgaaatgctttaaaatttgttcgacgctttgaaggtagccgccgggattccctcttacatcaaggacgagaccgtcaatcccttgtttttcaagctttttcagcgccgcggcgaagtcctgggcggtatgctcggaaaatgtcgatatgccgatgtagccgacatgatgaccgcctgattctttgcgggaagcaaatacggtttcaagcgggatttccgctctcttaatccggaatgacagctgtttatcagtacccggacgctgtattttaatagaaaccttcgatcctttttttcctctgattttcagcacggcttcgtttaaacctttcccgttcattgactcgccgtttatgctgatgatttcatcattcggcttgagtcccgctttttccgccggagattgcttaaacggtgatacgataatgattttattgtctttcataccgacttcagcgccgatcccttcgaaagaagaatcaagagaatcggaaaactgcttagctgtctgcttgtccatataaacggaataagggtcgtttaatgtagacagcatcccctgaatcgctccttcaagaagcttttcgttatctacattttccacgtattcgttcgagatcagctcatatgctttttcgattttttccattgcccggcttctttctgcgtctgatgaattcggctgtgccgccccggcaatatgggctccgccgcacatgatgctgacggccgctatcactgcgatcattttctgcttcatcgtttacctcctcttagtccttttacgaaaacctggagatagtatgtgtaaattgcaaagaattcatgtaacggcaacaaaaaaatgaaaacgcgagattgtttcatatatatgggtaacgtataatattttgtatgaaattcattaaatatacaggagaatgcgatatgaaaataaaattatctattttatccgcggcggttctggccgcaggcattaccgcctttgcctggccaaaaacagaggccaatgaaaaaacgcagacggacgccttgtatgtttctcccgcaggcagcgaccaaaatgaaggaacgttagaaaagccgttccgcacattaaaacatgcggctgaaaaggcagaggccggaacaaccgtattgattcgggaagggacgtacgatgaaacgtttgaagtaaagcacagcggcacggccgaaaagccgattacatttcggaactatcagaatgagcatgtctcaatcagcggcaaatctgcgccaaaaagcgattctgaaactccgttaattcaaatccgcaataaacagtacattaccattcacggcgttacgcttgagaacctctccgtatcatcagaagatgcgacggccatggggatctgcgtcaccggatcaagcagtcatatcaacattgacggcaaccatatccgaaacattaaaaccacggctgatgagggaaatgcacacggcatcgcgttttacggcacaggcgccatgaaggatgtcagcatcacaaataatactgttgaaaaactgacgctcggcgcaagcgaagcggtcgtgctgaacgggaatgttgacggatttaagattgccggcaataccattcgggacaataacaatatcgggattgacgtgatcggatacgaaggaacgtccaagcaaaacgactatgcgcgaaacggcgtcattgaaaacaatacggtgagccataactcttcttacggaaatcccgcttacggagatgaatattcagcgggcggtatttacgttgacggcgcagaacatgtggacattaagaataacaccgtttacaacaatgacctcggcattgaagccacttccgaacataaagggaaatacgcacgagatatccggattacggataacaaggtgtacggcaatgcttacaccggtatttcaatcggaggctatgacacgaaacgcggcggcaccatcaattcggtgatcgctcataacattatgtatcgaaatgacacgaaggaccttgacggcggccagctgttgctccagtacgatacaaaagggaacaccatcgaaaagaacatcatgacggcaagcggttcacggatttttatcgcaaatgattatacgaaaaacgaaggcaataccgttaatcataacgtctatcacaaagaagcgggaaaagacggcatttggaattggaagaacaaagaatatgattcattcgcagcgtacaaaaaaggaacggcaaacgattcggattccatttatgcggacccgatgtaccgtgacgaatcgtcttatgactttacattaaagcccggatcaccggccctacccgtcattcagtaacgaaaccattaaaaaaagccagtctatatcagactggcttttgtatttatacacgaaggaatttccgaatggaagtcagacttccccatactccgataaccgcgccgatcagaatgagcacaagtgatacttggaacacaaacggactgtacggcagaagtgaaacaaatgagccctgaactttcggggccacccaagcgaccatcgactggtacgtactcagcacgagagcgatcggtatgatagaaccgaatacccccagcagcagcccttccaggaagaacggccagcggataaaccagtttgtcgcgccgacaagcttcatgatttcaatctcttttcttctggcgaaaatcgtgattttaatcgtatttgagattaagaacatcgccgtgaacagaaggccgatgattaacgcaatcccgatgttgcgtgacaccccgacgatcttaaacagacggctgacttcttctttcccgtatgtcactttatacacatgatccagcttctcaatttttttcgcgactttcggcgtatcatgcggatctgtcgttttgacgataaacgcgttgttcagcgggttttcctgatcttgcattttcatggcctttccgctgtcgccgaagcttttgaccaattgatcaagctctttatctttagatgaaaactctacgctttggattcccgagatgtctttaatctcattctgcagcgtatcctgcgttttcttattagaagtcagatcgattaatactttaatttccacttctttttcagcatttttagccatgttgtttaaattcagcataatgactaaaaacacgccgaccaaaatcaatgtaacggtaacggcactgatggatgcaaatgtcatccatgtgtttcttccgagagatttaaaactctcacgcaaatggcgcccgagaattttaatcataagaaccatactcccctcttgactcatcacgcacaataattccgtcttcgatcgcgatgacccgtttcttcatggtgtttactatttctttattgtgtgtcgccatcacaacggtcgttccgcggttattaatctcttccagcgtcttcatgacttcccatgatgttaccggatcaaggttgcccgtcggttcgtcagctatcacgacgtcaggattgttgacgatggatcttgcgatggaaacacgctgctgttctcctccggaaagctggtcgggaaactgccgcgctttatgcttcagctgcacaagatcgagcacttcgagcacgcgttttttaatgactgactgctgctctccgataacctcaagtgcaaacgcgacgttttcaaacaccgtcaatttcggaagaagtttgaaatcttggaaaacaacacctattttacgccgcacgaaaggaatctctttttctttcacagacgcgagatctttatgattaatcaatatttgcccttttgtcggcttttcttctctgtaaatcattttaataaaagtagatttaccggctccgctcggtcccacgacatatacaaattctccgggatgaatcatgactgacagcccgttaatcgcttttacaccgttcggataggatttatatacttctttcatctctatcatgaaatcacctaatcttttaattatgtcttgcagccatagagttcgcaaacgtacagcggtttatggccgatttaccaggaaacagatgaaaaatctgaaagttccttttcctcagtacacttcattatacgtcaaatttagacatattactattacagtttcttttcattcccagaccgtgaaaaaaccttgcccctataacaggcaaggtttttctgttattttttctgtgacagccattttgcgatctcagcggcttccttatcatttacaagatggctcggcatattgccgcgtccgtttttaatgatgctttcaattttagcttcatcatacttcccgccgacttcctgtaaattcgggcctccgccgccttctaagtcttttccgtgacagccgatacagctttgctgataaagctcttctcctgctgacgcagaagcttttgatccgcctgagctgtcagagctttcttttttcgattcattggatccgccgcatgccgccagcaggacggacatggtcagaaccagcgccagcagcgcccattttgatttcatatgtaagatgcaccccttcgctattataaccccgtttacgcgcgtttgaaaccctcgccgagcacctcgcttgcgtctgcgacaataacaaaggctgactcatcaatttgtttgacgatttgtttcagttttgtgaattcggtctggccgacgacacacattaagatcggccggtcatgttccgtatacccgccgactgcggaaatcttcgtcacacccctgtcgatttctttaaacacagccgatctgacggcttcttcatgctgcgtaatgattaaagccattttggaacggttgaacccgacctgcacgacatcaatcgttttgcttgaaataaataccccgagcatcgcatacagtccctgctccactccgaaaacgagcatcgcgctcagcacaattaatccgtccatgatggcaaggcacgttcccagcgaaagccccgtgtatttgtgaatgatctgccccgccagagccgttccccccgtggagcctttgccgagatacacgatgccgattcccgttccgatcccgacgcctccgaaaatcgccgccagcagttcatgggtcgtcgcggcaggcagatctcttgttaaatagacggcgagcggcagaacgatggaaccgaccagtgtcttcattccgaacttcccgccgagaatgaccactccggcgataaacaaagggatgttaataatccactgcacgtaagccggttcaaaaccaaacgtttctaaaatggtgctgatcccgcttactccccccgctgctatacggttcggcagcaaaaatacgttaaacacgatccccgtaatcgccgcgccgatcatgatgtatatataatctttgatcagacggagcggcttattgtgattcacatccatgcaaaatcctccgttctccgattttctctcgatagcattttaagtcttcccggcttagaagtaaataacagccaaataccgtattaatttgctaaagcgctgttgtgaaaaatggaaaagagaacggataaaaaaacacaccttgccaaaggcaggtgtgttcccggattacgacagtttagaacgtaaataggcgtcaatgaagatatcgatatctccgtccataaccgcctgcacgttccccatttccgtattggtgcggtgatctttcaccatggagtacggatggaagacgtacgagcggatttggctgccccagccgatttctttctgttcgccgcggatttcgtcaagctccgcctgctgttcttcaattctgcgctgatacagcttcgctttgagcattttcatcgcccggtcgcggtttttgatttgtgaacgttccgtctggcacgtgacgactacatttgtcgggaggtgggtaatccgaacggctgaatcagtcgtattgacgtgctgtccgccggcaccgctcgcccggtacgtatcaactttaatatcttcggtacgaatatcaatgtcgatttcttcattgaattcaggcatgacttcacaagacacgaatgacgtgtgacggcggcctgatgaatcaaatggagaaatccgcacgaggcggtgtacgcctttttccgcttttaaatagccgtatgcattgtggcctttaataagcagtgtgactgacttaattcctgcttcatctcccgggagataatcaagcgtttcaactttgaaaccgcgtctttccgcccagcgggtatacattctgagcagcatggaaccccagtcctgggattccgtaccgccggcccccggatgaagttctaaaatcgcgttatttttgtcatatggttcactgagcagcagctgaagctcaaattcattcaattccttcgttaatgacttcagctctttttcaagctcttgctgaaggtcctggtcaggttcttcttttaaaagatcatgtgtcatttgcagctcttcgtgagactcgctcagctgatgataggagttcacgtattctttcagaccgttcgcttcattgatgacggtttgggccttctgctggtcattccagaattccggttccgccatcttttcatctaattctgcaatgcgggcttcctttgattcgaggtcaaagagaccccctgaagtccgctaaacgagaagccatattttcgagctctgccctgatttctgataattccattccattcacctcattaaaagatccggggcgccataagacgcagacccggtcatgttcgcttcatacagtcgagactattctgtccggccgcagcaatttttatatttttttccgcttccgcaatggcaaggcgcgttacgtccgatatccacaactttgcggaccggcgcttttttcgcttgtttggcctcatcgccgtcctgcggctgatgagccgtcgtttggccctgaacaacttcttcgcgttccagattgctttcaatctcggccttcatgacgaatttcgcaacctcgtcctcaatggactcaatcatgtgctcaaacatagcgaaaccttccatttggtattcacgcagcggatttgtctgcgcataggcgcgaaggtgaatcccttgacgcagctgatccatcgcatcaatatgatccatccattttgaatcgacggcacgcaatacgatgactttttcgaattcacgcatctgctctgtgccgaaattctcttctttttcattatattttgtcatgatgcgatccatgatcatctcatgcatttcatccggttcttttccgaagatatcgctcttttcaagcgcgccttcatcaagatacgttgaattcaccagctccacgaggccgtcaagattccattcttccggaagctcctctttcggcgtataagcggcaattgcacgctccagagaagacttgatcatgccttccacaatgtcacgcaggttttcagagtcaatgacttcaaaacgctgcttgtaaatgacttcgcgctgctgacggagcacgtcgtcatattgaagaagctgtttacgtgaatcgaagttgtttccttcgacacgtttttgagatgattccacggcgcgtgacaccattttgctctgaatcggcgtggagtcatccataccgaaccggtcaagcatcgccatcgtccgttcagctccgaaacggcgcatcaattcatcttccattgaaagataaaattgtgtgatacccgggtccccctgacgccctgaacgtccgcggagctggttgtcaatccggcgggattcatggcgttccgtaccgacgactgcaaggccgccaagctcttttacgccttcaccgagtttaatgtcggttccgcgtcccgccatgttggtcgcaattgtgacagcgcctttttgtcccgcttcttcaatgatctgagcttcacgctcatggtttttcgcgttcagtacctgatgcggaattcctttattcttcagaagtttagaaatcaattcagacgtttcaacggcaaccgtaccgacaagaaccggctgtccggtcatgtagcgctgggcgacatcctccgccaccgccttgaatttcccttccattgagcggtagatcaagtccggacggtcgtcacggatgaccggctggttggtcgggatggatacaacctgcatgttataaatattgcggaattcttcctcttccgtttttgcggtaccggtcatacccgcaagcttttcgtacatacggaaatagttttggaacgtaatcgtcgccaatgtcatgctttcattttgaatctccaggccttctttcgcctcaattgcctggtgaagaccttcgctgtagcggcggcctttcatcagacggccggtgaaggaatcaacgatgacgacctggccgtcctcaacaacataatccacgtctttctgcatcgccgcatgggcttttaaagcctggttgatatggtggttcaaggccacgtttttgacatcaaacaggttgtcgatgccgaacgttttttcagccttcgtcattccttcttccgtcagctgaacgcccttcgttttgacgtcatacgtataatcctgatctttcttgagtgtgcggacaaacgcatttgcctgcacgtacagttttgtggacttctgagcttgtccggaaataatcaatggcgttctcgcttcatcgactaaaattgaatcgacttcatcaataacggcaaaatgaagcgggcgctgcaccatttgttctttatagagcaccatgttgtcacgcaaataatcaaagccgagttcattgttcgttgaatacgtgatatcggctgcgtaagcttcgcgtttttcgtcttttgacatcgaattcaggttcaggccgactgtaagcccgagaaacgaaaaaatttctcccatttgctgggcatcacggctcgccagatattcgttgaccgttacgacgtgaacgccttttcccgtcaacgcatttaaatacacgggaagcgtggacgtcagcgttttcccttcccctgttttcatttcggagatgttcccctcatgaagggcgatgccccccatcagctgcactttaaacgggaacatgccggttacgcggcgggaagcttcacgaacgacggcaaacgcttcgacaagaaggtcatccgtcgtttctcctttttcaagccgctctttaaattctgccgttttatgtttaagcgcctcgtcagagagattttcataatctcctcttaaggcatcaatgtcatttgctattttttcgtatttgttcagcgcacgtttggtcggatcaaacattttatttaaaatcccaagcatctataacgctcctctatgttcacatgcagattttgcatggaataaatgataattttctgtccatgtatacctctcattatcataacataccttttgctatttccaaagaatttgcagataaagatagagaaaaaccttccgcgcgttcacggaaggctggatgggtttattcagtcggttcaattaatccgtatttgccgtcatttctgcggtaaacgacgtttgtgagattcgtctccgcgttggtgaatacgaagaaattatgtccgagcatattcatttggagaatcgcttcttcattatccatcggttttaaattaaaacgcttttgacggacaatttccgggctgtcatcttcaatttcgtcctgaaccgctacgcccgtatcagcagcgctgccgttctcgaaataatgtttcggaagaccctgctcgcggaattttcggttgacttttgttttgtgctttcggatttgacgttccagcttgtttgttgcgagatcaattgcattgtacatatcctcgttatgcacttcagaacgaagcgccagatcagtcatcggaatggtgacttcaactttggattccttatcattatagaattttaagttgacgttcacatcggcattgacgctctgctcgaaatatcgctccagcttgccgatttttctctccacatgatcctttaacgcaggtgtaacctcaatgttttctcctctgatattgtagttcatcaaagaacgcctccctttatctaaggatatgtaactatttctcttttaccccttctgatccctgctgaaacgttaaaataatgtgtaaattcggtgaacgatgacgaatggtgtcggttttatccggcagcttccgccaggattataagtatatgcggaggacgcaggcaaaagacctgccgcttgcagcaggtctagtgaagaacatacggtttgatgcagtcgtgcgtctgctccatccatagcttataatgcggcagaaagatggtttttaaaaactcctgaaaaggggcggacgggaaatcataatcatttaacatgctgaaatcctgaaagatctcgtcaaatgagcggatcgccgtctccacgcatcggcactcaatgatagacagcagaagcgcatgagaggaatcgagatgaaaaaaagcctgaatcaaatcgttgtaaatccgctcgccctccgtcttaaaaaaatcatcctgcgtgtccaacaggtagcaaagcccctcatcaatcgtaaaaagaagctggtaataggctgacaccaaatggtaatcgttcaaacttctcaaaacactcacctatttgcgtttgtcgtaataacggccgtcacttgtcgtttgatgatacggattgaaatacgtattatggtagattcgttttttcttaagcgtttttatttcatttcggataccatcctgaatccgtttcacttcgccggtaatcaggcggtccatcgcggccacctgctgaagcagcgttttttcttcttcggaaaaaggcggctgtatgcccgcaagcatctcctcccttttctccgtaaatgccgtaacgctgctgatgagaccgtcgctctccggggcgtccttcagtgcggcgtacatgttcttcgtttcgttatacaaagaaaagacattgctgttcatcaggcaaggccgcccgcgccatggctgtttttccgttcactctgcatggcctgcttccacgtatcgcgaaattcagtaacgagattttccgcttcatctaaaaactctccgttattctgcacgttcgcatcgatcagccggcggcggatgtaatcataaatggatgacatctgctcggaaatctcaatctcccggtttaacgtgatgctgagctcttgaatgatgttttgcgcctttacgatattttcatttttggcttcaaggttgttttgcttcatcgcctgccttgccagcttaatgaatcgcaggcagccgttataaagcataagggtcagctcttccggagcggctgtaaagacggatgtctgctgataagcagcaaaaggattatttattgccatttttataaaacctccaaggttatgatgttgaagatcctaacattgacgtgagatatgaagattggctgttcaatttctccaatgccgtatccagtgcgctgaactttttataatatctcgtttcgatgtcatccagcttcgttttcatattggaaatatttgtttctatttcattcaggcttttcccgatggcaaagctggttgataccgagctttccgtacccgcctgttttgtaatttgggtctgcattttgtttaatgtgtcttttaatctccgggcaatcccctgttcctccgggtttttggttttcgctgtatcagggctgtctgcattaaacagtttagccacgagagcaggattctcggtaattttctgtttcagtttcgcttcgtctttaatgacaagctttccttgatccgtataactatcagacgtctcaattccgaaatctgcaagctgatattttttcccgtcaatcgtaaccgttgagtacagatcaagccgcatctccgccaaaccgttctgcagcgtgctgtcgctccgtaataaaccgcttttggcctttgcttcccactgctcaatctgcttatcggtcatcgcttctctttgttcatcggttagcggcttataatcacggtattttgattccgacgccttctcgtttacacttttaattaacgtattgtatttatcaacgaaatctttaatgttgtcaaaaatgccgtccgtatcagtcgtgctgttaatcgtaaccgttttattgctgtccgtcacgctgttcagcgtgtatttgatgccgttgatcgtaaagttattggacgtttttgtcatttcaagcccgttgaacgtaaacttcgcgtttttcccttcggcattggccgtcagttcatttgttgcatcatcaacggcaaaaccgagctgatctttcagaaagcttttggttgcgtcatcacctgcggcaagggtaaatccttcccccgttttattggaagtgaacgcaatcgtatccacataatccgtgccgttggaaattttctcttttaaagcagtcactccgagacccgagctgttcagtttggaaatgacatcgtcaatcgtatcggttgcggcgatcgtgacgtttacctcagtcggcttcgtttcacccggatttgtgacattgaatttcaatgtttggctctgacccgaagtgaaattgatggcgcctgatgatttataagtcgtcggcgtagccagctgctgtacagacatactggttgaaatattctgctcagcactaacggccaccgcgctgacactggaatccgaacttgttactgtttttttattccagtttgtggacatcagcatattattaaatgtcgtagaatacatgtcggcaatctgggtattcacttcccgataagcatcgcgcttccattcaagcgtctgcttttgctggtttaatttattaagcggctgcttttcggcatccatcatttttttcaccagagaatctacatcaagaccggaattaaggcctgtgattcttgtgaccatatgtaccctctccttttcggcgtttagtcgtagacggctctatgacaacagtgagtttccgactgtttatcatatcacagctccataaatgtatgatcttattcttatatcggtcatattaaaaggttttcaataatttaactgcaaaatataatgtttcattttgtcaatagggttctttggcttgctgaaggggagatagctgaagaaataaaaaaaagaccctggagaaccaggatctttccgtcattaacctttaagcaattgaagaacttgctgaggctgttggttagcttgcgcaagcatagcttgagaagcctgagtaaggatgttgtttttcgtgtactgcatcatctcagaagccatgtctacgtcacggatacgtgattcagcagaagtcaggttctcagaagaagtaccaaggttgttgattgtgtgctctaaacggttttgaaccgcaccaagtttagcgcgctcgctagatactgtgtcgatagctgttttgattgttgtaagagctgaagacgcagctttagctgaagatgagatgtcgataccttttgtagcgtctttatttactgtagtagaagttgtagtgtcgcctcctacagtagcttttttagttaagtctgcgccatcaatagcagtagctttaacagcccctgttttatttaaagaatttagaacgtcttcttgtgaagcagtaatagtaccatcagctttttgcgctaatgttacagttactgttttgctagtctcatcataagacgcagttgttttatctacatcagaagttccagccgcagtgaatgaaattttaacggcttcaccttgatcatttcttacttcgagttcagagtttccatcaagtcctatcttttcgccaacttggccaataacttttaaagaatcagcgttcatgttgttgattgaaaggctcatagtttgaccttcgttagcaccgatttggaaagtcagtttgtcagccgtgccatcaagcaatttctttgtgttaaactcagtatctgtagaaattcttgtcacttcagaagaaagctgatccatctctttctgtaactcgtcacggtcagaagtggtgtttgtatcgttcgccgcttgtgtagcaagctcgctcatacgctgaagaatgctgtgagtttcgtttaatgcaccctcagccgtttggataagagagattccgtcttgagcgtttttagacgccatgtctaaaccgcggatttgagaacgcattttttcagagatcgcaagacccgcagcgtcatcaccagcgcggttgatgcgaagacctgaagataatttttccatgttttttgcagcagagtttgaacctgcattcagctgacggctagtgttaagagccgcgatattgtggttgattctcattttgtatttcctccctgaattgtttttcgcacgtccttgtgcatttgcgcagcgtcattctgaagaaaatttttcctctcattggctacactatatatatcggatggccgcttctattgtttatattgaaaataaaaaaatcctcactttttttgtgaggataggttaagtaataaatcagtattaaaagatacggctctgttgttctcttccaggatcgacaagtagatttctttccgatgaatatctacgtgctgaggcgcttcaattcccagcttcacttgttctccttcgatggcgatcacctttatttcaatatccggcccgatctgaatggactcattcacttttcttgagagaactagcatgatcctcctcctatcagatgttttgtttcataggaagcatcatgtaaaatgatttgtttcgccttcatttcctttttattgacgataatcggcgcttttaaattggcggtcgtgttttcaaaaggctcttccagcgttaaaatcgccatcacttcgacgtcctctatatcttcaatatgcaaaagttcaagcgtcgcatggtcaatgtcaaattcgtaccctttaaagaaaataaacggactggcgacaataaaggcgatgtgctcctgtttcacagactgcagcgccaaaaacggtgaatcttccgacaaaggaagaacaacaaattgagtctcgtcattaaatcccggcaggccgttttcaaatgagataatctgcccttcgtctattctgatttctccgtgatattttgttttaattatcatgcttcacaatcctttaccactttcatcttttattctgcgttgccatcgtcaaccgaaatcgtcaccttagggtcttgcatcatatcaatctgaactttccccggcgtataattccatacaggtttattgacggctgcttcaattgaaggtttgcgggcttcaatatcaatcgtaagctttgaaggaatgcagtcaatgtcgacgagaaactgcgcaggcagaaagtcgctgaattcgccgaatggatcgggcggtctgacatctgctgcctgccgggccatcacattgcccgttttcttttcgatagccgccatttccttcccttccctgactgtttttgcaataaactcgctgcaggcttccgcacctttctgggcggcttcagcgttcagcttttcaaatgatttgagattcaagttctcccacgccctcgtctggtcaatcgtcagtttggccggcgtgctttcaatgttcagctctgccggcggctgctcgatttccaggtcagcgggcggctgttccatctcgatttcttccttttgaaaggttataccgattttagcaggcacactgtcaataatcaatctcggcatctgcacagagatccctcctatttatagtattttagtaaaaaaagcgatctccctggtgtgagtcgcttttttatatattgaagacggtcagttaaattatttcagaaagtcaatcagtgacggctgaatgatattcgcattcactgacagcgctgctctatgaaccgtctgttgagataaataatcaacaattacatcttccatttctacatcttcattatcggacaatactttttcagcggttgccgcttgtgattccaatcttgtctgaatgagttccaaccggtttgtgcgtgcgccgatattggatttttcagcattcattttatcagtaaaaccgtcaatatctgacagaatttgatctgaatctgcttcggacagcgtgcctttgcttaaagaagcttctaaggagttaagaaattcaaaaacattatctccattttgtgcgacgcctccgaaagctgagtttggatcagaattcactttcagcactgctccgttcgagatgttgatgttaacatccgaagcaccggtataattctcatagttgtacgtatatgtgccgtcggcattttcagtgatcggcgggacgtctgaatttgttccgttaaacagataacgtccgtttacctgagtattcgcgacagaaacgagctgctttttcagctggccgatttctgtaccgattgctttcaattctgtttcaccgttcgaatcacttttcgcctgaaccatcaagtcccggattttccccataatatccgtttccgagtttacgcttgattccgagttttccagccatgtaaagccttgcgaaacattccgctgatactggtttacctgcgcaagctgagtacggtactgcattcccttcattgcaacgaccggatcatcagaagctttcgtgatttttttccccgtagacacttgctgctgaagccgatcgagcttgtcataacttgagccgataaatcgaagagaattttttgcgatcatcccttgagttactctcatttacttatctcctatcttcctccggtgcccataccgttaataattttatcgaatatttcatcttgcatcgttataatccgcgcagccgcattataagcgtgctgaaactgaatcatatttgtcatttcttcatctaaagacactgcactgactgattgtctccgttcatcggctgaaagggtgttgctttcagagttgttcataagattggccgctttttgtgaattaacgcccagctttccgataagggattcataaaagtcattaattgtagtggtttcaccgttaatagtcagcttgctgttctgtacggctgcaagatttgtcgcgttggtgccgtcacttttttctccgtttaacgacgctgcgatattatcagtagacgcaaggattttgtcactgacttttattttcgctgccgcaccttttgccggcaccgcttcaccgccgctgaaatcaaaaaatgctgcaccctgttcgcctgtataggtcttccctttttcatgaactgcattaaacgcgtcagcaaaggacagcgccatattgtcaagagccgtcagcatttcaggataaagacctttttcttctccgtttgacatatagccgtatgattcaataagacctaaaagtgagccttttccggtaaatgcatccgcattgaccgtactgctgccgactgacacactcgacacgaggccgctgtccttgtcgtagttgattttcatttctgaaactgtttttgtgttaccgtcgagcagcgtaccgagagaattgttgtttccgttcagcaattcgacgttaaccgtgccctcagcagtcgccaaggcatgtccgcccgacttattatatgaaactttaatatttgccatagaagataattgatcaatcaatctgtctctttggtcatacaaatcattagggagcataccgctcggctcaactgccgctatttgattgttaaggtcattcagctgattgagaatggaattgacctgatccgctgtgttatccaggttctttttaatatcaccctgaatgttagtcaaagaggtagatatatagttaaaactttcggcaagagatttcccctgctcctgcaaaactgagcgcgctcccgtattttccggattcgtcgccagatcctgaagggcattccaaaacgaactgagcgatccgtttaatccgttatcgtcaagctctttcatgacgccttccatttgtgacaatgaattggaacgggctgtatagtaccctaattttgtattttcagttctgtactgatagtctaaaaaactgtctctgacgcgctcaactgaaccggcttttactcctgttccaatttggccggccgtcagatcactgttttttgatactgcgggataagggctcgtcgattgtaatgtgacgcgctgcctcgtgtatccttctgtatttgcatttgcaacgttatttgaaactgtgctcaatgcagtctgctgcgcactcaatgcacgccttgctgtttccagccccataaaagtcgatggcattgaaaatcctccgttctaagcttttgaatcgaataatgtcaaacggctgacaggcttgcgcgccgcttgcggctctttataattcatattctctttttcacccggcatgatcatatcgaatgccccggagatgaattgtaaagcctgaatcgtgagctgtttgttcatctcattcacttctttcagacggtcaagaagcgcagacaaagagtgaaataacccttcaagctcctgtttttcactgcctgaagttctggagatgcatgcagcaattgtattgtcctcaccgcggctgagaaactgagaagttaacctgattcgctcttcctcagtctgcccgattgcctgaatatacttttgctctttggtcaatatgttggagagctcttttattttacctgctttcagcgcttccgttttctcctcagacagcgtgagcagatgttcatgcagtgcgcaaagtcgcttcagttgatcaataattggctttgctgacattggctttctcctttttattgctttttatagaaatttactatgttttcagcgatgctgtttgaatctattttatatgttccgctctctatatccgctttaagctgagcgattttttcctgtcgtgttttagtgaccgcatctgacgcattttgaagctcttttgcatgagaagaaatttccactttgtccttcggctttgcagcctctttttgtacggcttgcttttcgtaatttttttggtatggattaacggattgtgttccgtactgattgattttcataggattcctctcgctttctgttcgcagtctaattcttttatcgactgcgttatcagttagtttagggaatcaggtgtttttggtattataggcatagtatgtgtcttttgtactgtttttctcttcgaattcagcggctgttttttggttcatatggtctaattgcgactcaatatctgtctgacaggacttgcaaaatttccccgtcctgattggatttccgcacctttcgcaaggatatgccaaattcggaagctggctgatctgaatccttttttgtttgataaacttgaggatcagctcttcatccacacctgtttcctcagtgatctgctgcatcgtcgactgtctgttgatctgctttctcaaaaatttatagacggtttcaaatgctttttcttcttctttaatacatgcctggcacacggtctgcaggttcgttttaaaaaataaagcattgcattttggacaattcgccaattcacccatcgtattaactcctattccttctttaatctgccttatatttctattaattatatcggcagaaaaaaagaatgatttagctcctgattaaagtaaaagaggagaccgatgacgctttgcccgctgtcagcaggacttcggcggcttggtgaagtgtggcgcccgtcgtataaatatcatctattaaaatgacgttcataccttcggcggagttttcggctgctgaaaactttttttctgcagacagcctgtctgttttgctctttttggattgtttttcgttgttcagtcggatgaggggggaaatgacgggcattccgagcagagaggccagcagctcggattgattgaatccgcgttccgccagccgttcgccgctcagcggaatagggatgagagtatgtgtatttgatggatatgccgctttaaagccggcagcaaagtcacgtccaaatgcttgaatgattttcgcatcacccctgaatttaaaacgggccaatgagtccttcatcgcatcattatataaatataccgaacggttttgccgcagcaaaaagcgcttttccgtttttgattcccgggccgcacaatcagcgcatttttcattagactcctgaggcctcccgcatatactgcatacggggccttcaattttttcgaattggctgctgcatatgctgcatacctcttgctcgggcgccagagaaaacagagatctccaagtcaatgaacttgaaattggtgagtcacacaataaacaattcagagatattacgctccttcccgagtttcacagaactcgcttggattaaccgaaacaatcgccgctgattcagccagaatgacaagcagcgccgtatttttctgtttatcaactatctctgcttttgcataagcaactttctttttatctgtaacatatgccggttcagcccggtttagtgaaagtgccagtacatcatttttgcatacccggcatgtgcatttcatatgaagcttaggcatatggcggtcgagaagttcctttaatatgatttctttagaattgacaagcatgctgacagctcctcataggaaagtatgagtatactgtatcacgttttctgaaattaactagtccaacaatttacttttttgtgccaatttgttcatatgttctatatgtttttttgcttttttcattccgtttgtcattccgaaatgaaacatgacgacatcaccgctgaaatgtttataatgccttcccgttctgcccgcgatctgtacgagcgcgctctcagtaaagataggtgcttctgcgccgaggacacatgtctgaactttgggcacggtaacccctctttctaaaatcgtagtcgttaccagcaggtcaagccggccgtctctgaaccgtttcactttatcctttctgaatgtgtcttccgcatgaatgccttctgcccgtatgtttaatttctgaaaataatccgttgtctttttcaatacgtgtacagacggaacgaataagaaaacaggcagctgtgattgaagtttttggcaaacccaatccgttacagagcgcggcagttttcctttctgaagcttcttcttccaattgccgcaccacaaaaaacgcggctccgggaggggtttccgatgatatctggccggtatgcgaacgcttttcagcaaacctgcttcagcattcttttttaatgtgtctgaaggagttgccgttacataaacaagggcgctgtttttcttcctcgctttatcaacagcgaaccttaatgtctcatcggctgaaaaaggaaacgcatctacttcatctattatcatgacatcaaaaatgtctcggtagcgcatcagctggtgagcggttgaaatcatcagcggagtcagacggcctttgtcctcgctgccgccgtacaaagcagaaacgtcgactttctcaaatgcttttttcagtctcggcagcagttcaagtacgacatctgtacgcggagtcgcgacacagacgcgcaaaccgtgattcagcgcaaactcgatacccggaaacagcatctctgttttccccgatccgcataccgcccatactaacagctcttgtctctcttttatcgcatctgtaagcgcggcggccgcccgcttctgtccgtctgtcagtgttccttcccaaaaaagctttacaggctcccagctgttttcagaggcttgattccaagaatataatgatgtcagttcatcagcccttcccatcatgacacaggcacggcaataggtaatctgccttttggcagaggacgcccaaaatgccgcaaagcaggcttgatcaaactgaccgcatcgttggcagacgtaacggtttttccggcggatgattgacggctcggccgttatatactctttttctataaaacgcttgatgcgctgatctgaaaacggtatctcagatctcaataaatgccggccgtaaaagaaatcccgcacctctgaaaattctgaagcaccttcggacatctccctgcctcctttctgctcaaagtatgcctgccgggaacccacttgtcgaattgcgaaaattaaaaaataaaaaaatctccgcccttgaaaacggagattttcacttagtttttaaagcaccagccgattccgatggcgccttcgcccaaatgggttccgatcacggcgccgaaatagctgttatagaattcgacatgaggatatttaccgcttaactcctgtataatagccgccgcttcttcttccctgtttgcatggatgacagcggcccgcatcgggattcctttacttgcatcctccccaaacagctcaaaaattctcgaaatcgcttttttgcgtgtccgaatcttctcaaaaggaacaattaccttattgtcaaaatgaagaataggctttacctttaacagaccgccgataaaagcctgagcactgcttagacgcccgccccgctggaggtgtgataaatcgtccaccataaaatacgcacggactgtttttttcatatcatccagctcttttataatctcttccggtgagtcaacaccgtctttaatgagctgtgctgcctttaatgcataaaaaccttgtgccaaacagctgatctctgaatcaaagggataaactttaatatgatcaaccatagtgtttgccgaggcggcgctgttatatgttccgctgattccgctggacaaatgtatgcttatgactgcgtcatatgttttgcccagttcttcgtacaatgcaattaattcaccgaaagaaggctgagacgtagtcggcagctcatcatgattttttacttctttataaaaacttctccagtcgagttctgtttcttcgcggaatgttttttcaccgaaaaccacttggagagggatcatatgaatatgatgttcttctctcatctctttcggaatatatgctgtactgtctgttaaaactgcaatcttcatcactttacctgccttattaagtacttaataagtattttaatagatatgcagctgtaaaaaaagacttgccataacaggcaagtcttctcacacatgactaacgcatctctacccagccgtttttaatagccacgacaacggcttgtgtccggtcattaacgttcattttctgcaaaatattactcacgtggtttttcactgttttctcactgataaacaatgattcaccgattccgcggttgctttttccgtctgcaagcatttgcagcacttcacattcccgtctcgttaatatatgtaatggtctccggatttccgggtaaacctcatgctgaggatgagcagaaactccgcttgtcgcaagacggcggaattcgttgacaagattgtgggttactttcgggtgaaggtaagaaccgccctcggctaccactttcactgcttcgattaaagtatctgcgtccatctctttcaggagatagcctcttgcacctgtttttaaagcatgagtcacatagttttcatcatcatggatggagaggataatcaccttagattcagggtacagctcaacaagctgtttagtagcctctactccatttacattcggcatattgatgtccattatgacaacatcgggatggtaatgctcgacgattcgagccgcctcatctccatcgtcaccttctgctaccacttcaaaggtaggttcaaaatccaatattctttttacaccctcacggaatagttgatggtcgtcgataataacaatatttactttagtcacacgctacgcctccttatcctattgttctatatacgccgctgttcggtcaatatgtcttttggctctatttaacaaattataggccgagagataacggaaccttaatcatgataaatgtcccaagacctattttagagtctatcgttatcgttccttcaagcagatctactctttctttcattcccagcaagccgaatgacttgtttttcttttgtttagcatccttaatatcaaagccttttccgttgtccttaatgatgagaacgacaaaatcagcggttacttccacttttactgtaatttcctctgattctgaatgcttgagtgcatttgtgacggcttcctgagcgagacggaaaagcgccacttcaaattgcggggcaagcctttggttctccgtgtctccgatacactgaaaatgtattttcacctttccgttgtattcttcagttgtataaagatattttctcagtgtcggaatcagcccgagatcgtccaatgccatcggtcttaaatcatatataatccttctgacttcgtaaagggcattccgcacattctgccgcagatttctgatttcctgaaatccgtcctccgtgccgcggtcgcggaagatccgttcaattaattccgatctcatcatgacatttgccagcatttgcgcgggaccgtcatgaatttctctggaaactctttttctttcttcctcttgggcttcaataattcttaaaccgaaatcttgtttagcctgcgcatcggcaagaagaagccctacttggcgaaggtcttgattcaggtaattcagaacgacggttatttggctgaccaatgattctgaccgttcaatgatttcctgaagccccaaaagccggcgttctaaatcatctctgcgctcccgcagctgcttttcacgctgctggatcatcgtcagttccacttgaagtttgtgcgccttttcataggcgttgcgaatttcttcttcgctgaacttatggaaatttctgcttacttcagacaagcggtttcgtgcgtgccgcgtatgaacttcaagtttgtcgcccagctcaatgacttcgtagacctgctgtttgatctgtttgagttcttcaaccagctgctcatattgctggcgcgactgctctccgatttgaaaaacctcgtccttactcccgtccacggttttcagcattttcataagtatagaatccaaaactttggagtccatcttcgatttattcatctgtctccctccgtaacggtgttgttatgtatttttattataaatgtaattgaactgcaatttatgtcgaattataatgaaagaatgcgtatattctagaaaaaaacatttttatatagtatcttactctttcatgataccaaaatatgcgcaaaaattctaaagtctgttcgaatttgtagaaacaagtcttttaatgcttgtcaggagggtccagcaatcatgctgcacagctatttaacagttaaagaaacgggtgaacatgagattgtgattgaaaaatcgcgttttatctgtcacctgagccgtgctgcttctgaagaggaagcgcaggaatttatacaaaagataaaaaaacagcactggaatgcgactcataactgctcagcttatctgatcggcgaaaccgaccatatacaaaaggcgaatgatgacggagaaccaagcggcacagccggcgtccccatgctggaagtgctgaaaaaacgcggtctgaaagatacctgcgcggtggttacccggtatttcggcggaataaagctcggtgcaggcggattgattcgtgcatatggaaagtcagtgtctgaaggcttaaatcatataggagttacggagcggaagctgatgcggattatgcatacatcagcggattatacgtggctcggcaagatagagaacgaactgagagaatcagtttttttactgaaagatatccattatgcggatcatgtcgaatttgaaacgtacgttgaagaaaaagacaaagaagcgtttctaaaatggatgacagaactgacgaacggcaagagtaagaatacagagggagaactgacgtatttagaaacagacgtcagccctaaaggagactaatgtaatggctgaacgtgtaagagtgcgtgttcgaaagaaaaagaaaagcaaacgaaagatcatattcaaacggattttgctgctgcttaccctcgttttgttagtcgctgccgggtttggcggatacaaagtatacaaaacgatcaatgcggcagataatgcatatgatgccctttcccgcggagacaaatcaaaattacgggataaagtcatcaatatgaagaaaaaaccgttctccattttgtttatggggatcgaaaattatgccacaagcggaaaaggcggacgatcagattctcttattgtcgttacccttgatccgagaaataaaacaatgaaaatgctgagtattccgcgtgatacgcgggtgacgcttgccggcgacacaaccggtaaaaaatcaaaaatcaatgcggcttttgctaagggcggagcggatgaaaccgtctcaaccgtcgaagacttattaggcataccgattgataagtatgtcactgtcgacttcaatggctttaaggatgttattgatgaagtaggcggggtcgatgtaaaagtgccgtttgacttcgacgagatgagtgacgtcagtaaaaagaaacggatctatttcaagaaaggaaacatgcatttgaacggtgagcaggctttggcttacgcgcggatgagaaaacaggataagcgcggagacttcggccggaatgaccgccaaaagcaaatcttaaacgcactgatcgaccaaatgtccagagctggaaatattgctaaaattgataaaatcgctgaaacagcgagcaataacgtccaaacgaatatccgaatcactgaaggactcgctcttcagcagatttacagcggctttaccagcaaaaaggttgatacactgaccataacaggatcagatttatatttaggcggaaccgcaactacgcgcggaacatattatttccagccggatccgaccaatctcgaaaaaatacggcaggaattgcagaaacatctggattacccgtccggaaacagcacggcatccgatcctgcttctgacagcaccggaacggacagtacgactgattcgacttccgacagcacgggaacaggcggtacggctgattcgccttccggcagcacaggaacaagcggcacgaccgattcaaccagcggtactgcaggtgaaaacggtacgggcagcacacagtccggcggcacaacaggctattaagagtaaacccgatcctttgagcaggatcgggtttttttatataataagagaatagcagaatccacaaaaaagcagaccattcgcatgatctgctctttttagtttttcttcaccaatctcttgtaaaacttggtaaatggtttaaattgttcatttactaaccctgtgacctctgctatgatttgcataaatacaatcaatacaaaaataataaacagcgaaagccatatggtcgcgcttttcagcaggatggcactgacgctgaaaataaagccgattaaataaatgataatgacagccgtacggtgtgacagcccgaaggccatcagccggtggtgtatatgtgacttatcaggcgctgagatcggctgtttgtttaaaatccgcctgatgacggcgaatgtcgtatcaaaaatcggcacgcccaaaatgatgatcggaatgatgatactgaataaagtaacacttttataaagacctaataatgagagtactgagatgacgtatccgagaaagagcgatccggtatctcccataaatatctttgccggatgaaaattataaaataaaaatccgagtgtgcttcctatcacgacaagtgaaagtgacagaataaggattttccctccggataacgccataacggcgatagtggagagtccgatgaccgacaggccggcagcgagtccgtccaaaccgtcaatcaggttcatcgcgttcgtaataccgacgatccataacacagtcagcgggtaagcgacccatcccaattctaaacgttccgttaaaaacggtacggagaaaaagtccattttcagtcccgtgctcacaatcataatggccacggccagctggacgaaaaactttacctttgcgcttaattggtatttatcatcaaggattcctaaaataacaataataaacgcacccactgtaatggcggtcattttcgtttcattatatatgccggccgcgagcacacccgccgctacgccgataaagatggccaggccgcccatacggggcattattttatcatgtacttttcggttgctgggctggtcaactgcacctattttgatcgcaattttttttacgataggagttaggattaaaaccgttagcagagagacaaaaaacgcaacaactatgcgaaacatgcgttcgtcaagcataaagaagtctcctttggaattatatgaagtcttttctgatattgaaccgttccttccattataattcttactagttattataacaagcatcatcaaaaagaaacacgcaaatcaaaaaatgcgctttcccttttaatgggattgcgcatttttcaatatacccgtgcattcgagcattcggccgaataaaacattccaatcccgtctccgggccaattcacggcgcaaagcctcatatgatccgctgcggtccgctgccagaagcgcgtcgcaggccgcgatgaaatctgcggggtcactgccttcaacgtattcatagacgaaaggccttttgatttttgacgtagaagaaaggttgcagccgacaaccggtttcccggcggctaaaaattcaaaaagcttaagcggaaataccgcgtcattataaggtgaatttttatacggcatgatgccgatgtcgacaagctgcatataggacggcacttcattcggcgcggcaggtcccgtccagatgacattcggacgcttcagaagcgacttgaaatccggatcgtcctgagccgtgttcgggcctaccaataaaatcgtccagtcaggcctcacatctgccgtttccgccataagcgcaaaatcgagcttcggtttgattccgccgataaaaccgagaaccgttccgttccgtccccgcaaaatgtcttcatccggctgtttattttcccgtgaaaacaggtcatattccactccgttttcaatggtgaacactttatggtgcgggttctccagcttttttccgacctcgtggtgcagacagtcagatgtacacgtaatggaatcggcacgctgaatgattctcatttccgcctgtttaatgatgtttcttctaacatttgacagcaccccggaccggccgctgatcggagcggcccacagatcactgcaatcgtaaatcacttcatcccaaggaaacagatctgccagaagcggaaaaccggggaaggtgtaccataagcagcagcgggccccttctccttcttccttcagcatgttcaacaatggtgaaagcttatgcctgtagcacatgtcagtatacctgccgaagcgaaaagctttttgcttcatgagatcctttacagtgaactgccggattccctcggaaattccggtcatctgtccgtcatttgcgcgcggagacggacatacccaaatgacgcttttcgtttctttttgccgggcgagaaattcagccagccggtgccgtctgtatctcagccggtcatgaccccattccgccgctccgacgattacgtgaataatcggttccaccttcatcacccagctcctctgacgcctacagtcttttcaagaccgcgtttttcgcatattgcataaaacaccacgaagccttgataaaatgcaggcgctcaatttctctatagacaaaccatgtttttttggcggctttccacttgttgcttgaaatcgaattctgcacaagcctgtattctgaaaggcactcattcaggccgtaagccgtaaatccccttttcagcagggaaagccatgtcgctaaatcctgccgcgttctgatatcaggcatttgaatctgtcccgtctgctctctgtcaatcatgaccgttaaacatccgataatcgtgttttttaaagcttcatcatatgacaggctttcaggggcttgaatcgttttgtccgtcggcgttccgtcctgctccatgacgctgtagcccgtaaatgaaaaagcgcaggaccgctctgccataaacgcaagctgtttttgaagcttttcctttttccatctgtcatcgctgtccagaaatgcgacataacggcccttggcatgtttaagggctgtatttctggcagccgcggctcccccgtttttctctaaataaacgacgcggatccgctcatccttttgttcatattgccgtaaaatatctctcgttccgtccgttgaacaatcatccgcgataatcatttcccaatgcgggtggctttgatgtaaaacagactgaatcgtgtcttcgatatattcacttgcattataagacggtgtaatgacagatacgaaaggtttccagtttgtcatggtcacatctccatcgcagatttttacaaggactctctaaaaaactcaggaatgacaatgaacataaatgcaactgcaatgccgattaaaacgcccagaaccgctttccttttcggcggcatgccttctcccgccgtttcattcatcggctctgaattgatgatgccggccgctttcaggttcagctgcgtatttttcaattcgtataaaaatcgttccttatccactttggcgtccgcgctgacggtttctccttcaagcgcagcaatactctgccgcactacttttgcccgtttttcaaacaggtcctgatcattcttcagaaaagttgttatgacggcttgaaacaccgattcggtctcctgtttgttttggccgctgtagctgaccgtgatcaatgaatctgattgtgtttcgacagtcagtttacttttcacggccgctctttcttcgtctgttttatcaggcaaagcctgctttaaaaaggcatcgctcgtcaaaaggagcgggatttcttttgtattgttataaagcggatgatcataatttcccgcggcgatcgcggcttctgatgtaaaactgctgctcccgctgatttttgacggcaatacatatcccgccgcccctaacacaacgggcagcgcaatgatccaaataatattctttttgatacgccgggttattcttgtcaacatatccttcatctcgcatctccctgtttttcatagtacgccgtgacggcaggctccttttgtaaccccctcaatatattgaccgccgcgatcacgagcgagagaaatacccagtggaaaaataaatttgatacggagcttgggctgatgctgcttaccaaaaaaccggccatcgccgtgataagtccttctgtgatcagtcttgactgattttccgattttctttcatgacatttataaagtgtccaaaaaaggaacaaatagactgtcaggtaaccgagcatcgtaagcacgccgaagttcgccataatctcgacgagccagttgtgcacctcaactacgccgcccgtatcataaacgggctccgcttttaaatagtaagagacgtttccggcacccactccaaacccccaggaatcaatcacatagtgaaaggcgttttttaaaagattcgccctcgcgaggttggaaggaagcggttgctgtcccggcatcgcctgcggagctgaaaacagattcaagacggcgttggtgatacggcccgcaaataaaaccgcaaacagcgccgcacccgctcccgttgcgtacagcgcgagctttttcaacagggaaggcagcagaatgaagacgtatacagccgcccccgcgcatatgcccagcagactcgcgcgcgaaccggttaaaatgattaaatacaaagcgctgatcgcaaagagcaggctgacggccttcacatagccgtttttcatatttttcaccgccgccgcatacagaaagaaactgatgcacaaaaacgtcgcgaaatcattttgattaaagaaaacggacgtcggataatgctgtttgtactgcgggccgttataaagcgtggagctcggcagatggtggtgtgtaaaatggttgtaaaagccgatcgccatcacaaaaatggtcatcacaagccatatgccgtaaaaaaccatcagctgatcaaagcgctgaatgaacatgacaataagataaatcagaaacatgcccattcccattaaagctaaatatttaatcccgtacgtcacggattttgcccacaataacgataggagaccgtatgtaaaccataaggcgaaaaacatcagaaccccttttacattcacccgattccatctgtcaatatgatgacggtttgttaggatgccggcgacgtgaagggcgcctgctccgattaataacagccggtatataaataagctgaaaaaaccgagatggaccgcaaagaaggcctggtttaaaaatgtacacgcgatcagtatgtaaatgagccccataaacatctgaccgtttgttgtaaaggcggatagcaaagcaagtcccgcaatgccgatcatggcggcaagcagcagcacggtgatttttccgaagccggcatccgccctgaccgcctccagcatgatgaatcctcctgtaatgagagcggcaagcagcacaagaacatgtgccgctgaacgtttgatactcacatggcaaacccctttccaaaaccggcagccgagccgggctgccgagagcctgaagacaaatctttttctatcttgccagttcttttatttgccgatcggcatgaaccgccggacgtccgacggaatgataagtgaatcctgaaatcctcatatactccagcggaaacatatttctgccgtcaatgatgaccggctgtttgagcagctgcttcactctctgaagatccatctccttgacttccggccaatctgttgtaatcaggcatgcatccgcgtttttaatggcactgtacagctctgtgtgatattcaatgccgccgtctcctaatatcgctgacgcttcgggaatcgcgatcggatcatacgctttcacgtgagcgccctgctctttaagacttgtgatgatatcaagagcgggggcggagcggacgtcatttgtgtgcggtttaaaggccagccccagtacggccgcggttttcccttttaagggaccgatggcgcggttcaatttttccgtaatacggacccgctgcttctcattggtttcaatgacggcttccatcatttgaaacggatagccggcggcgtttgcgatatgcaataaagccgttgtatccttcggaaagcaggatccgccgaatccgatgcccgcctggagaaatttattcccgatccggctgtcaagaccgacgccttctgacacatgggaaatgtccgccccgacacgttcgcaaatattggcgatatcgttaataaaagatattttggcggctaaaaaagcatttgcggcatacttaatcatttccgcgctttcaagattggtctttacgatcttcgtacggaacggcttatgaagctcttcaatgaccgaagcggcatgttcgcttgtggcgccgatgaccgcccgctccatctgcatcgtatcccgcaccgccgaaccttcgcggaggaattcaggatttgacgcgacatcaaacggatattttccctttgacgcttcgctgacgatttggtaaacgagctttcccgtcccgaccggaacggtgcttttggtgacaatgattttgtatccgttcagctgttctccgattgtttgcgccgctgccttaatgtaggtcagatcggcttcacccgtctttgacatcggcgtaccgacggcgatatagatgatatcagcggctttcacagccggcccgatttcggctgtaaaggataaccgtccggcactgacatttttttcggctaattcctcaagccccggttcatatatcgggatgactccgtttttcaagcttctgattttcgcttcattgatgtcacagcaagtcacatgatggccgatttccgcaaaacaagttccagatacaagacctacataccctgttcctaatacagcgatttttttcacagcttcatccctctttcgaaaggttctcctcttgcccggcccggttcattacggatcggtatttctctttcagcgctttcgcgttgtggcttgcgtcaaaatacgtgcggacggtttgataaagttcctcggctgtttgcggcgtccaagcctctccttcgtcatattgcagaatcgattctgccagcgtctcaggtgaacccggcttgatcagcaacccccggtgtttcccgaataaagaagccaatcctccgacatcggtgcaaatcaccggcaccttcagagcgagcgcctcaatgaccacagtcggcatgccttcgctgtaggacggcagcgccattacatccgaagccagcagatagtcctgtaccttgtcgttcggcacttgccccgtgacgatatgagcggcttcacgcaatgaagatgcggcgggaccgtcaccgacaaagacggctccatatctttcatccaatgattgaacggcttttgataagtcgaaaacgcctttctctttgacaagcctgccgatgaacacgatcagttttttatccggaggaaggccgagccgttttctgacggcttctttcgtctcgttcctttttcggaagtcgtcaagcgtgatgccgatcggaagcacgctgcactccgcttcgataagctttttcatttgttcccgcagactgccgctcacagcgtaaatatcggctgcttcccgcaccgcaaatgtaaatgcgcgatgagcgcttttgctgtaatgcggatagacattgacatcactgccatgcaaggtcagcacatatggaatgcctaaagcctttgacacaatggcggccgctccgcctgacggcatggcgaaatgcgcgtgaatcagatcgggcttcaggccatgatttttgatttcggaaagaatggattccgccattcttttatgcggctgcgcccatttcagctgcccgggaaccgcctgataaaacggccggtggacggacacgcctttccgccattcatgcgccggcctgatatccttttgccgatacgtctttttcagcacccggaatggcgcggcgagtttcggccgcggacaaatgacggtcatctccgcgccaagctttctcagttcttgggcctgcgtctcatgaaaaacgccttcccccggcttctcactgctcggatagacacttgtcatccacaataccttcatagcaaacgtccttttcttaatttacttttcatatgcggataagcttttcctaacaggaataaataacacaacgcgccgcaggctacggagatcgccagccgcagcttgacatcaaggctgatccgctccgtgccgaagctggctgtaaaggcgatgacacccattgccgccgtaagcagaaacggtttggccacggctttgaagtaagccgacagccgcagcttaatgacatatgccaacagccagcgcccgatcaggaaattcaggatgctgatgaaagcgtacgtccaggctaccgtcaagagatttccggacagcacggcggcgtacaaagatgcaccatacagcagcatcaccccggcgtcccaataaaacgccagatcggcccgcccttttgcgagcagcacagatccgttcggattcatcagaacccttaatatcccgacgatggcgagaacgtttaaaaccgggacagccgccagccatttttctccgaataccgaagccacgaatgcatccgacactgaaaccaaaccgagcaaaagcggaaaggatatcagcgcgagtattttggtcatattgagaaatccttctctgataacgctgttttcatgcttgtttttcgcaaagacgggaaacgcgactctcgtaatgatcggattaatttttaataccggaagcgtgacaatctggtaggccagattgtaaatgccgagcgcctcagcgccgataaaactgccgatcagaatcatatcaatattcgctccgagccggttcacaagccgggaagacagctgaaaggccccgaaagaaaagaagcctttcattcctttcagatcaaaaaccaacgccggtctccatgtttttctgcaggccatccagtacagaatccctttcgacgattgcagcagcacctgggaaatcacataggcgagaatcgggtccgtataaaaaaccgcggccgccaaatacacgaaggacagcacatttgaaaagatttcaatcttgcttaacgtgttaaatgccagcgctttttgcagcatatactggtattgctgaccgatgggcgcgattaaaaacatgacggccagcacgcggattaaatagacaagctcctcccgccgataaaaatcggcgatgagcggactgctgaaaaacagcagcgcaaacagcgcaagccctgttacgatattcagccagtacaaggaagacatctgtttatcagtcacatgatctttttgaatgagcgcggcgccaaaacccatatcaagcgcaatttgggcaaacaccactaccgttgtgatcatgccgacaaggccgaattcagccagtgacatgacccgcccgagcagggcgaattggatgatttgaatgaccgtaatacacgctgtcgaaatacttgtccatttggcgccgctcaagatttgatttgtaatactaggcatcgttttccctacttttttgtctgctgaccagaatttttatcgcgccccgtcaccggtccagatcactttgcacgttttgagcataatcttcagttccaatgaaaaggtcaggttgcggatataatataagtcaaacattagtttttccctcggtgtcatgtcatatcccccgttgacctgcgcccagccgcttaatcccggcttaacggccagccgctccgtaaaccccggaatctcagcctgaaactgttccgtaaacacgggccgctcgggacgcgggccgatcaggctcatttctccccgaagcacatttaccagctgcggcagctcatcaatacgggtccttctgataaaagcgccgacctttgtcacgcggggatcctttttcagcgcccagaccgcccccgatttttcagcatctattttcatagagcggagcttatacaaataaaacggcttcccgtctttgcctacccgctcctgcttataaaaagcagggccgggcgactccaaacgaatcagtatggagaacaggcccatcaccgggagcgccgccaagagccccgcaagcgcaaacacaatgtccatgaatcgcttaaaagccaaataacgggccgttctttccgtaacggcagcggaagtcccctgccgcactgcatagttattatttacattcatgcttttctctgctcccactgacacacacctcacgatttgttgggatgtttgatgacctatgccgtgagtttagcagatggatgttaattggaagtaaaggaagcgttaatgtttattagaatgtttcgattattgtttttttattgtaaatctattcatatccataaacagcggttactataattgaaaaggatcacaacgaaaaagcctgccgatcaattttgaccagcaggctcgtacacaaatatataaaagttttacttataataagacacgattccatcattgatggctgcagctgccttttccttataggatgcttgctttaatttacttgcatcagacggattcgtaataaaagccgtctctactaatacactaggcattttggaatacttaatgacatagaacggagctgttttaacctctctgtctcttgtttttaatgcattaacaaccctaggctgaatttgtcctgccaggcgtttgcttgcagcggcttgatatgtctcatcatagtaggtctcagttccgtttgcagaagttgcatcatttgcattgccgtgaacgctgataaataaatccgctcctgcggttgcacctttatttaccctttcctgcaaggaataaaatgtatcattagacctcgtcatgaccggcagagcacctgaagcatttaattttgtattcagccttttagcgatatcaagattgacgtctttttctaaaatgccgttacctatagaaccggaatcttttcccccatgacccggatcaattaaaattgtttttcctgctgccggatttttcagctggtttgcaacatttgagctgacagccggggtattcccgataatggtaaagctgcttaatttttttctcccgataaagactcttgtttcttttgaaagattgctgccgtttgtcagaatgatagattgttttttctttgcagcaagagcagcacccgctatggagtctgcatacccgaaaccattgctgacgaatacattgcctgtcggaagatttaattgctgaactagattggccgcaagttcgtatcgattgcttccgctgattctttttggagaagggagttttttaaagacagaggcatttatgctcccggttccccctgctacaatagagcttttgatccccttgctttttatagctcctgctgtggcactgttgatagctgttttattcgtaaacaaaattggatatccgttctttgcggcatatggaattgcagctattgcgtcagcatataaaaatccgtttgcaataacggcttttgaggcggcaggcatttcctttgctactttagctgccgtatcatatcggttgcttcctgaaattctcttaacactgatgccgagcgctttgatttgatttgctgtatttgctgacacagcaggcgttccgccgacaataatgaccgtttttgtttttaattctttcagacgggttttcgtctctgatgacaaattatctttgtttgtgtaaagcagcggcgcatttttctgatatgccatcggggcagcagatatagcatctgcatacgaacctcctccgacgacaacagctgtactcgctgttgaatacacctgcttggaaagcgcagcagccgtaccgtacctgttgcttccccctactcttttaaccgcgttgtcagctaaggctgacgggataaataagatgagtcccagcatagaaatgatcaggactttaagataagaacgcaattgccttcctcctgctctcgtttatttaatagtcagtcaatgtggtgcccggataataaaattttaaaattgaactatatgaatctcccgaatccgctcttgccttagcgccgtattggctcataccgatgccgtgtccatatccctttccgctgattgtaaaagcagaactgttttgactgacggtcacataagtgcttttaaacacggaggctccgatcatcgttctcagttcagtcaccggcacagtcattgcagatgttttatttgcctcgtaatttccattgttttgtttgacagcgtaattcactttcaaagttgctgttttagcccgctgtcctttagttgttccgctgaatgtaagatcttctatttttaaaattttaatggcggaagcgcccgtttccttatttttcagaatccaatttttaataccgctcagttgagctgcatttgtctcattctttgaagcaaaccaagaggccggcttatttacatcaattgaatccggattgatttgctgcttagaaagcgtcagactccaggcagtttgaggatcttttgtgtcttttttcgcagttaaataaggaacgcttgaaccccatacttcgccgcttgattctgtataaccgccattactcgatgaataagccgccgtaattaaattccctttgtaagtcagcaccttattttttgtctgctgcaccgctttcgttgtattggcattccagctgtacccgccatatacttgaaaagcagtagtatcagcaacagtgctcccggtcttcgtaattgagtatgttcttgccgcaaccgtttgcgccttcagcgcttcaagagaccagcttgcaggcatttcattcggtacgacaccttttaaataatcttcaaaaggaatgttttcatttacaggtctgatatatttgcctgactctattgaaaaattaaccgtccccaagtattcttttccattcaaactgatccggttggattcattgtacgtttccggttttattctcaatgaattcccatatgttttaatatgattaagatttaactttccattattgatttgtaagttgtatgtgcttccgccggctaagtaaaaatggtttgaaagctcattttcaaccccggcggaaatggagcttgtgcttccgataaagtcgtatgcatacgacgccttctcttttgtcactgatttagctgctgaaggaacatcatcttgtttgatatataatatttggctgttttttttggcggctaaagaagcgccaaccaggacatcagcatatttcgttccattagtcatgacgactttatcagccttcaactttagctgattaatgatattagcagtcaattcataccgtgttgatccgggtattcgctgcacatttgaagtttttttaatttgattttctacagcatcactcacgctgaacgaactcccgataattatgacttgcttcggaagatcataatccggcaatttatccttttcagtcagtaaaatgggatagccgtttgcagcggcatacggagcaatggctaaagcgtcttgaaaaacattacctgttacaacaattgctttatcgtaatttcccatttgttttgcaatgttttcagacagaacataacggtttttcccgctgattcttttcacagctccataagacttaagcttattttcaacgtcctttgaaatacttttagccccgccgatgaccagaatattatcgggattgaacttagcaatctgtttttctgttgtttttgtcaaagtgtccggctgtgtaaataacaccggcgcatccaatttttttgccagaggaattactggtaatgcatcgataaaaacatcacgattgacgagaataacggttttaggattcgtccattgggagtcagatgcaagagccgccgtctcatatcgggatgcccccgaaaagcggttggttacagacacatgatcaccggtaacctgataaaaaccggttggagataaagaaatgcttgattgatttcctatgtaatttgtcagcttaacagatatatttgaatctgccgcaaaggaaaccgccggtataagcaatataacaacagctagagtcagtcctattaaatgtttgcaagttttcaagattacagcgtccccctgttcattaatttgccggttcgatatccttcagcataagctgtcccttgctatttttttgatattttactgtcactttgtcgccattatccaaattcttaacatcgtcggctgattcttcagtgatatcaaaacttaccggttcatgatccacagtgacttctattgtatgagtatccgccagtcctacataagtgccctctttcgttaccagcttttcacccgcatcctcaccctgagatttttcattattaactccgcacccggcgagaagcagtataaagaacaaacatccaaaaatttttttcatttttttcacctcattatggattatcgacaatatattatctattttaaagaaaaattaagaaacattgaaacttttttcgataacattcgactatattaggatttattgtattctattataaaatattgcatttactgggagttcgatttccaatttaaaacagatggggtgtattgagatgagaagtaaacgaagaaaaaagactttgttactggtctttctgacaatcatcggcatttttattttagtttccggcggctttacatactatctatggcataaagcggcatcaaccgtcgccagtattcacgaagacattaacaaatcgaataaacgcagaactgaggtgaaaataaataaacacgaaccgttctctgtcttgatcatgggagtggacgaacgtaaaaatgataaaggaagagccgactcgctcatttaccttacagtcaatccaaagacaaaaacaacggaaatggtcagtattccgcgtgacacttatacaaaaattataggcaagggcacgatggataaaatcaatcattcatatgcatttggcggtacgcaaatggcagtagatactgtggagaatttcttgaacctgcctgtagattatttcattaaagtaaacatggaaagctttaaagatgtcgttgacactttaggaggcatcactgtcaacagtacattcgctttcaactatgacggttattccttcagcaaaggcaatatttcattaaacggtgatgaagccctcgcttactcacgaatgagaaaagaagatcctaaaggggatttcgggcgccaagacagacagcggcagattatagagggtattatcaataaaggggcaagtatctcttctgtcacgaaattcggagatatgtttaaagtagtagagaacaatgtaaaaacgaatttaacctttgatgatatgtgggatattcaatccggctataaagatgcccgcaagaaagtgattcagcatgagctgaagggtgacggcaccaaaatcaacggaatttactattataaagcagatgaaaacggtcttgcttccattactaaagaattgagaagcagcctcaacctttaaactaatgcagaaaaagcagcttcgcatactttatgcggagctgcttttttgttacacttcaaaagaatcaggatgctctgaacgcagtccgaattgatagagcagtccctcagcaatccttcttgacgccatgccatctccatagggattagatgcccgcgacattttttcatattcctgcttgtctgtcagcagctgttttgccatctgataaatcgtttcttcatcagtaccggctaatttcagagtgcccgcctccattccttcgggccgttcagtcgtatcgcgcaatacgagaaccggctttcctaaggaaggagcttcctcctgaacgcctcctgaatcagttaaaataaaatacgaccttgacgcaaaattgtggaaatcaatcacttcaagaggttcaattaaatggacgcgctccgaatcaccaaagtgcttatcagcagcttcacgtacagcaggattcaggtgtaccggataaacgacttgcacatcactgaattcatctgcgatccggcggatggctttaaacatatgttccatcggctgacctaaattttcccggcgatgcgccgtcagtaaaatcattctgtcattgccgattttctcaataatgttatgggaatattcagagtgaaccgttgtatgcaaagcatcaatcgctgtatttccggtaacaaaaatggagctttcttttttattctcattcaataaattttgcttcgctcgctgagtcggagcaaagtggatatcagcaatcgctccggtcatttggcggttcaattcttccggaaaaggtgaatatttgttgcccgtccgcaatccggcctccacgtgtccgactgcaatctggtgatagaaagctgcaaggcttccggcaaaggttgttgtcgtgtcaccatgaacaagaacaatatcaggtttgatttccttaaacaggccgtccagttttaccagggcgtttgaagtaatttcagccagcgtctgccgttctttcataatattcaaatcaaagtcaggcttaatttgaaatgcgtgaagaacttgatccagcatttgtctatgctgggcagtcacagtgacatatgattctatttcagggcgtttttttaattcgagcacaaggggcgccatttttatcgcttcaggccttgtaccgaataccgtcatgactttaagttttttcatatctctttctcctgtatcaagtttgtgatcatttttcattatcaacccattttacacgatatgatccgccggttaaatatcttgtattatttttcccctaaatgaaaaaggatatatcattaaggctttacggataaaacttgtttaataatggtttatcttatatcattaaaagtgttaaaaatgaaatatcgggtatacagaaaatatcagcaagcctgagtctgtatagatatcataacttatatttaagtgatgctaaggaaggtgctttaaagtgaaaaaagtacgcaaagccataattcccgctgcaggtttagggacacgctttctgccggcaacaaaagccatgccgaaagagatgcttccgattgtagacaaaccaacgattcaatacataattgaagaagcggttgaagcgggtattgaagacattattattgttacgggaaaaagcaagagagccattgaagaccattttgattactcaccagagctggaaagaaacctagaagaaaaagggaaagtcgaactcttagaaaaagtccgaaaagcctctaatcttgctgacattcattatatccggcaaaaggagccaaaaggtcttggacatgccgtttggtgcgcacgtaattttatcggtgacgagccattcgccgtccttctcggagatgatatcgttcaagctgaaaaaccagggcttcgccagctgatggatgaatatgaaaaaacactttcttctattataggggttcagcaagtgcctgaagaagaaacccatcgttacggaattattgatccgctgacaagtgaaggccgcagatatcaggtgaagaactttgttgagaagccggctcaagggactgctccgtccaatctggcaatactgggacgttatgtcttcactcctgaaatcttcatgtaccttgaagaacagcaaattggtgccggaggagaaattcagcttacagacgctattcaaaagctgaatgaaatccagcgggtttttgcttacgattttgagggcaaaagatatgatgttggtgaaaaactgggttttattaccactacattagaatttgcgatgcaggatcgtgaactgcgtgatcaccttatccctttcatggaagacctgttaagaaaagatgaattataagaaaaaaagctgttggatttattccaacagctttttattttataatgcaggttaaagtttgattatcgttattgataataaaagcgtatttatcatttgccgcaataaattgccgatcactgctgccctttataacatctttattattcagggatagatctgccggagtaatagctgatattcctctgaaaacaagctgctcggccttgccattattcactgcataactgacctcgccatttttaagatatagcgtctcccggccgttcactacttctttctgcagctctttcatttcttgctgaatatcattaacgcgctcaccgagatgtgacacaagttgatcagtatcaccctgctttacatacggagaaaaagcggatgctttcacatttgaacttttttcgttatagaccgctgcattttccgggatatagtacgttttattattgacctcaatctttgctgattgcctgtcttcagataccactttcacctgagcaccgaacggaataaggaagtccgccttttttttcagctctgtatctttataggcctgcgtctggtcttttaatacgaaaccttttttgttcaccaatatctggtctttccccttgttaacatcatcttgatatccgatcttaccgaaggaagcgatcgtacgaagcggggcgctgaaaaacatggttcctgccataaacacaagcagtattgataaaatagcaatttgaatagcattgactgctgatccggatttactatttttcttttgttccttcacaattgcctgctgctcaggcgattcttttttacgttcagcaacctgatctttcttatatttctctttgtcttttttggagagtttattaaaccaatcgataaatgctttgtactctttgacgacggtttcagtgtcgtcgaacattcttaattcaccatagtgcatccaagccacacggtcacacattttttcaatctgaccgatggaatgactcacaaagaaaatggtttttcctcgttctttaaattcctggatccggtcaacacacttctgataaaatgtctggtctcctacggagagggcttcatcaatgattaaaatatccggatctatatgcacggaaatagcaaaaccaaggcgggacttcataccgcttgaatagtttttcaccggctgattaataaaatcaccaatctcagcaaactcaactatgctttcatacatctcatcgatttctttattggtcagccccatcattaaacatttaagtcttatgttatcccggcccgtcaaagcattatttaaaccggctgcaatcgcaatcagcgacggctggccgttcatttcaatttcaccgcttgtcggcggtatcacttttgcaagcagattggacatcgtcgatttacccgatccgttaattcccacaaagccgattgtctccccttcatatacatcaaaggagacatttcgcacagcgaaaaaaccgttatctttagcagggaaaaacaaaccttttattttgtccgactgtttttcataaagatgatactgctttgaaacatttcgaaacgaaacctttagtttcatcgtacaatctccttacgtattaaagaaagtcaataaacttatctctgaatttcatgtgtaaaacagaaccgactgttaacaaaaataaggtgaacagccagaaatacagtgtatatttcacatcttgaaagaaccactgaccatctaataagctgttcctgaaaccgtcaattatataaaaaagcggattcagcttcaagacaggaaccaattccgggtgagctgcccccagctttgagttaatatcccaaaaaaccggcaggaggaaaaacaaaagtcttgtcactgcctgcagaagaaactgatagtctcggatcagcacgctgattgtcgaattaaacaagctgaacgaaaataagaaagccatcagacaaacaaaataataaatatattgaagccaatgaaggctcggatagattccgctggcgagcaatgcaatgatatagatcaccatcataattgcataactgaacaaattagaagcgatggcgacagacggcaaagaactgattggaaaattcattttagccaccattttaattcttttaaatacactatttgatccgtctaatattgtcggacttataaaaaaccacggtatcagacctgcaagcatccacagaataaaaggcacttctccggcacctgtagccatcggccccccttttctgatccccaatccaaaaacaaaccaataagcaagcatttgaataagaggatttaaaaactgccataaaacgcctaaataattcatttgatatttagactttgtttcgtaggctgctaaacgcatgattaaaggaaatgatgttacttgctcttttagtattttcactacagcattcattttaatcttccttaggttgatttgattttataaagcatcgctgataattgtaccagaaatcaaattttttttcactttcaagccgcatgcaaatgctgctaaaaggtttgtaaatcataatagaaaaaccccttgatacaaaggggtttttctattattcagattcaaacacaattttcacgactttctcagaagaatgtcctgactcaagataacagaatttgtcataaaaaggtttgaatgaaaccgggtgctgataatccggtgatgaaatatgtttgattgcctcgatcgtttcctctgtcgttttcactaacggaccaggagcatctttctcaaaatcgaaataaaaccctctgagtttatcccggtatgtttcaatatcgggaacaaaaaacagcatcgggcgttttagatttgcaaaatcgaaaaatacagaagagtaatcggtaattaacagatctgaaatcatatacaattcccgaatatcttcgtgtgcagaaaagtcgtaagcaaacccttcaaacggaccgaggtcaaaattttcggccacaagataatgcattctcagaataacgagatattcatccccgagctcttcccttaatttatgcaggtctaaatcaaggtcaaatttataacgccctttagcataaaactggtcatctctccatgtcggcgcataaagaataattttcttatcctcaggcaggtttaaccttctttttatcgctgtgattgtctcattattattgtcattatgaagaaaatcatttctcggatagcctgattcaatcatagttttatcgaattggaaggcgcgcgcaaatatctcagacgagtaggcattaggggaaattaaataatcccaattggatgcctctttaataaaattccttttatattttttcgtattagtacccggcatatgaacttcttccatatccattgcaagtctttttaaaggcgtgccgtgccatgtttgaagataggttgtatgttccggctttggaatccataaaggcagacggctgttgacgacccaatattctgcccgcgccatagcaaacagccacttgatagaaagcctgttaatgtattgaatgcccttctctttaaaaggcgctgcatactgtttatttacgctccaatacattttatattccggatgattgatttgcatgtattcataaatggctctcggattacagctgtattgtttgccgttaaagctttcaaaaataatggtcttgcttttaacaggcattttgctcgccattctgaaaacaactttataacctttcgtaatgagggaatttctgcgttttttcagttttttcattttggaaatgaaacgttttttcttcccttttatgaagtatctcatccttgttttcaggctgtagtcgttcacacggatacaaacagtctgctttttcttctttttatatacctcatacctgaccggtccgctgtctttattcacaacgcttatgaggcctttcagtttattttttctgtctccgagcacaagcggagtgctgctgagaacaataggttcagcttcgtcgttttcacaatgaaactccataaacatacggtagacaaatcgtttttccagagaataaggaatatcttttaatggaatttttatttggaaatcaaaaatttcaggggtgaatgcatcttcccgaagctgttcaatattctccgtttttttcgtcattttaatagggaaatgtttctctacgggatcttctcccccttttttaatgacaaattgcaggtttttaactgaaagctgattctccgaacttagatatcctgcataccctgaaattataatctcttctgccttcagctgaatctcatcaaacttcacaatttttgcttctctttttacctttaaagagaaattgcccttatcagttgtataaggtaaaattaacagctcagtcgtatgatcaaggtggtaggcacgctcaatcgcttcagcttccacggttaaacgcacctgcttcggctgttcttcttccgctgccggttcccccagtaccacataaaaatcataagtctgtcccatttctaaaggttcaggaaacgagtgaatattaattgatgcactgtattgagccgggctctctttctctaaaataacaacatcctcggctccggaacgccgttcttttaattttaaataacatttcacttcctcagctaacggttcttcgctttcaagtgaaatagagagtgccaggtctcccacattattttttaagcttttcaaaatacatttgctcacggtattttcatccatacttattttctgctcctctgaattaaagctcttcacttaaccgatttcacttaatcgatgtgatcctttttgtttaatttaatagagaaattccctttcacagtcgtataaggttcgaaagtatatccgttattcataaaccgatctttttcgccgaaattgacttcacggctggatacccttcttagaatacggatatggtcagctgttatatattgaatgtaaaagtcaagaaccgaagtatgatttgcgtcaattttttctttttggatgtccttttcaaaatctatataaaatggctgagccggttgatcagcggatacggatatgatttcagatttgtttttccgatcaatcccaaccattcggactttttcaaatgcatcattctggtcagacactgaaacgctgatcgctaatccgttggcatttttttcaaaagatgtgatcgggtgttctttagaaccgactttttcagcaagccgttccttttcttttctcacttcaaccattttgaaaagagcatatgaccaatttttaatatagtttggtttagagtatttctccgccattttaaaggctagacgtgaaaattgtttgtgagtgctgtcatctctcattaaagagataatggcctcagccagcttttctatattatattgttcaattacatagccgtttactccatcttctaccaagcttctggcaccgtaatcgtaatcgtaagttacgaccgggcatccattgctcaatgcttccatattggacagaccgaaaccttcaaagtgagaagttgaaattgtcagccacgctttttgaaactcgtaatcagggttgttcgtgtagcctttcagcaatacattattcttgaggttttgagcttttatttcctttttgattttctctgtttctcctccagaaccgaatatttccagtttcgcatccgggatttcatttacaacaagtttgaacgctttaacggcatgcgtcaggtttttcattggtacaatccgagagataataaccgctttatttcgttcgctcggaactttcaaaacctcttcatcaagcggtttattaatcgtatgcggcgtaaaaaagaatgtctctttttcccctgaaatcaaactgaaatctgcaatctgctcctcagtgataaaaaatacggcatcaaggttatttatttgaccgaaaagttctttatagcgtcctttgatctggaacttattatcaccataatgtttattgtgaataatcgcggcataataagatgacggcgcttttttcactctgaagacatgtttatcctgtagtctgctgtcgaccagaaatagtttaggccgatcgttttctttttggagaatatcaatccaatgcctgcgcaactcaaattcatccttaaatgttaaagggtcttcttctgagtaccaagtaaaatgtgtgaatttgactgcttcactttggtcatcccacatgaagtgcttttccagataaacgacattttcgttgttgataaactcctgaaggaagatttgattcgtctttgtatcaaaatgagagacaatgacgggttttccttctttattgtattcttcccttttgattacttgtttttcatcattcaggtaatctacgtaacgcacgtcatcactgcctgaataataggaaagattataatcgtttgatgattttccgaacatttttgagatagttttgcttactttccccttactgacatgtttttttatttgattcagctcaatttttctccgaataaatccgcttgccttttgttcttttacttaaaaagtcatcgtacatgttgataacttgtgtatattgagggtccgttttctttctttcaaagagttcgtttttttttctccgaaattccaaatcaaatttaaaagtaagaaaggcggtattcttttgactctcttctccgaatagtttagaacgcaataatagtgatttggtcagacctccgtaatcatccgggaggcctcctgagataaaataatacatcatatcgggaagctcattattatcgttaataggctgattggacaaattttttctccctttcaccatatggaatttagtaaaacactgcaaaataatactattccctcagattattataacaaacctatttaagcatcaaaaagtactccttatcagcaaataagaagtactttgaacagttcatacattcaataattccgtattacaccccggcaatttcttttttaatctgtgtggtggaaatgccttcggttctagggaggtagatgacttcgcattgatctttaaggaaatcgaatttgccttcccaatcgtctcccattacgaacacgtcgatgttgtgatccgctacgtcacttactttttgatcccagctgttttccggaatgacttcgtcgacataacggatcgtttccagaatcagctttctgtgttcatagctgtggtaggcctttttttgtttttgcaggttgaactcgtctgttgagatggcaacaacaaggtaatctccaagctgctttgcgcgctcaagcagtttaatatgaccccaatgcagtaaatcaaacgttccgtaagtaatgaccttcttcatgaaacaaaagctcctttctatcatcatacgtataacaagcaactgctctgaaatgctgcgcagctgtatccttaatcactaaagtgccaatttcgtactcatggaacctcattatatcacatagccctgaaaaggttaagccaatgtaaaacgaagttacattccacttattaacaaatgttattacaataggagtttagcagggtttttgcgcgtatgattaaagaaattgttatcttatttatatttttgtaaaactattgttaagtttatctgaaggtattatgttaaaataaagcttagcctaattcacgaaaaagtgaaagaaaatcccgtacaaaaaggaggacggcagatgcagactgaaatggtgcacaacctttcttatgttaatggaaatttacaggagtttatttcatatttagacacttattatatcgcacagaagcaaggagccgtcattgcgacggtcaatcctgagatcggatacgctgcggcgaaagacaaaggttatcatcaagtcatttcttccgcggatttcgtcctgccggatggtatcggcgtcgtgttaatgtcacgtttgacgcagcacccgctgaaatcaagaattgcgggattcgatgtgtttcttgcgctgctcggcctcgcaaaccggcagtctaaaaaaatatttttatacggagctaagcaagacgtgcttgacgccgttttgaaccggatcagcaaagagtatccgaatattgaggttgtcggagccagcaacggttatgaagcggataaacgcttcgtcgctaaacagatttcccgggcgaaacccgatctcgtgtttgtcgccttaggatatccccatcaggaacaatttatttatgaatacaaacatcttttccctcaggctgtatcgatcggtttgggcggaagctttgatgtgttcagcggaacggtgaaacgcgcccctgaatggatgatcaaaacgaatctggaatggctgtacagactggtgacgaatccgtggagatggaaaaggatgctgaacattccgaagtatgcttttaccgttttgagaaataataaatcaaataaaagcctgtattccaagcaggcagaagatcaaacgaaacagctttaaacaaataaaacagcaaaagagattggtaatctatgaacttgcgatctttattcgccgctttttattctatatatctgtctgttctcggcgttttgttcaagcctgtaaagcccaagaaccacctgaccctgctggtatcttttgaagagaatgcacaggctctcatccgttcttacaaagcgcacgctgaatcgctttcttatgaaatgacggttttgtatacgagacatgccgtcagtctgaaaaaagagctggaaggtatcggctctttttatctgaacgaaaaacatccgctgcatcttttgaaggcggttttgatcctttttaagagcaaagcggtgataacggataactatttcctcatgacaagcgtcttaaaccgccggccgcaaacgacatgcattcaggtgtggcatgcgaacggctctttgaaaaagttcggccttgaggatgtgacgaatcaaaaccgtccggcatcagatatcagccggtttaaaaaagtgtaccgctcgtttgactttgtcaccgtcggttcagacgcgatggctgacgtttttaaaaagtcgttcggcatacgggacggccagctgttaaaaacgggtgtccccctgactgacgtctattatgaagaacacaagccggaactgaagcacaaatggccgaaaaaaatcatcctgtacgcaccgacattcagggattatgatatgcaatcctttcggctgccattcaccgaagaacagctcacaaacgcgttaaacggagagtatatgctgcttgtaaagcttcatcctgccgttttgcatcatatttcggcttcgtttgaaagcgaattgatcaagaacgtgtctgacatgcgtcttcatgatctcttgaaagccgctgatattttaattacggattactcttccgtgccttttgaattcgcgctcttaaataaaccgattttctttttcacgtatgatctggaagaatatgatcaaaagcgcggtttaatcgacaattatacttccgtcatccccggaaaggcttgtcatgacagcgaagctcttctggaggaaatgacgaaaaagccatttcatgcagaagaaatgaagcggttcgcggacaaatggaatatgtattcagatgggaattcgagcagcaaactgctccaatttgcagaagaacaaataacatacaaaaacacctgttcacacaattgaacgggtgttttatatatttatattgcctccgtagtgcttaaaaataatcgtacaaacaaaaagacatctgtccaatttaatattgaaaaaagctcggaagtatgactccgagctctttaacacgtttatttatagacaggaatatcatagtaaagctgatagttatctaacagactataaagactgtacattctgtttacctgcttatacgcccaaccaatatcagatgcatattggtggcttacagaaggctcccatctcattttatacaaggtatcttggttgtatacggcattgtgtatataactctgtccgataaatttggcccctccagtaatcgctgcttcaggactgaaccatccttggttatatgcatattgggcacccttgttcacagcgtctccgtcatatgcacctatgccatacatgttatatacctttttcccattataggtcacaccgtttgccagctctgaggtaccgtttccggtctctaataaagcgtgagaaatcaggtagagctcattaatactgttagattcagctgccttaataaaagcttcaccttttccttcaagaattcctttcccttttaaaatcttcgtattgacttctgatgctgtcagtcctgcatatttcgataacttcaaaaactgaaaataacttttatctgacacagaaaagtttgcggggtttacatagtaggaaacttcttcctcgcttgctttccgccaacccattttaattttggcccagttattctctacactaatgatattaaccttataaccttttgtcactgttcctataatattattgctctttacctctggagtggacctgacattaagaaaatctgcggttacggtagaatttgcactattaatataagatagagatacgtaggcacttgaatccgtctgcgggttcgcttttaactgcttcgcgaccatttcactcatcgtaatattataatttgtttccattatttgaggaccgcttttcacctcaacacttgaaactgcccacccataaagctgcttcactttgcttgcagccttatcagcattgctttttcctgtaaattgttcagtaatcactatactgtatattggattgtttttagtagtgtagcttgctgataagttctttgccttaaagaaactcagtcctttgtttaaagccgacgatgtgctgatttgatctgtaactaatttatattgcgtgtatgtgcttttgccattttgtttggcgttgcctttcgcattatttgttttaaaaaaagttaacacacgatctatatctttttgatttaataagtcactaacagtgacttgatattgcgtataagcggatttaccggttttttcacttactgccgttaatttttttgtcttgaagaaagatttgacttgattaatcttagctgtgtccagcaaggcttctgtcttaattttataagttattccttttggttgttttatagatttggcagttgcattaataccgattttctttaaagagtttaaaccttttgttacttttgttttgtcagcagtctgttgtgataacagttgatattgattagcagctgtttttcctgaatttgattttgatgattttaatttttttctgctaagaaaatttactgctttatctgcctgtgcgtttgttacagcatttgttatcacttgataagttgtttgtgttgacgttttctttacagctgtataagtcatatgccatcttttcttcttaaaaaaggcttgaagactttttagtttttccgggctgacatctttcattttcacaaaataattatttgtagccccaaccttttggtaggtccctttaattccagtgttattttttatttggctgatggcattcttaaccatactcagtccattaaaataacccgtttctatattatacgatgtgatagtttttttattattgatggttttgtaactgcttttgacgcctgtgctttgttcaagctgtttgataagacttttcgcctcatctgctttattaatcaaagaattcgttgtaacaatgtagtaagactggcctttatcagtcatgtttaacgtggcattcagcccagaatctttttgaaaactgcttttcacttgggatgctgttttctctccttgaatttttccggattgaatttgaatgatctccggttcctgttcaagtttttgataattagcattgactccagtctgcttctttaactcttgaatagctgcctttacactggcctcacttgtcagctcagatgtaacaatgcttatataaggctgcttcacaccattcggtttaacagtaccggttaatcctgtttcctttttcattttatcaagcaagttattagcctgctgttcacctgaaatagtgccggaaactgcagtataatagggctgcttactgcccgtcggacttgatgttcctttaatgcctgtctgcttcgtaaaatcgcttagtacgcttttagcattcgtttcgcttgtcagacctgaagcagatatttgatagttcttagacgttccgctcttttgatagtctgctttccatccggtatcttttttcaattttgcaactgcctgagaagcctcactttcagaagcaaacttttgtgttgtttctaactgataaatggaattgtcaatataagctgcctttactgagtctgttatcgtgaaaaattcaagagtaaccgctgacaataacattgcggcagccaaactttttttcattacctctcctccttctctatatttatctatcacactactacttttatcggaaagtgcttcaatttttaaagtgaaatatatataaaaaaacttaatcccagagctgggattaagtttggttttatatatgagaaacgatgatcgtgcaatctccgtttatcgtaaagtcaggcatctgatccggcagtatgaaatgcgcgcctttttcaagcttggcggacttgccttcacagatgatggagccgcttccttctgtgacgctgcacagcataaacggagcgtcctgggtcatttccgccgtcccgctgatatcccatttgtatacagaaaaatattctccctgcacaaaggttttgatggtgacgccttttctcgtttcagttgattcatctaaaaatccgtccacatgaggaacggtggcggcgttgacggcatcgcggatatgcagctcacgcgcctggccgttttgatctgtacgcccgtaatcatatatccggtaggcggcctctgaattctgctgtgtttcaagcacgagcgcccccgcacaaatggaatggatggtaccgctcggcacataataaaaatcgccgggtttgatcttcacacggcgcagcaggccttcccagtcaccgctgttaatcatggtgacaagttccgctttcgaacgggccgtgtgaccgtatatgatttccgcattttctttacagtcgataatgtaccagcactcagacttccccgtttcgcccagtccatgctcctcggcgtcataatcgtcaggatggactttaacggacagatgttgtttgacgtccagtattttcgtcagcagcggaaaccggtccccttccgttccgccgaataattctctatgctgatcccacagttccatcaaggttttcccttgatacggaccgcttttgaccgtgctcattccgtgcggatgggctgatatcgcccagcattcgccggttgtttctgaaggtatgtcatatccgaatcgttcgcgtaataacgtgccgccccataatttttctttacatacaggctgtaaaaaaatcggctcttgcgtcatgttcgttcccctccccttaaaaagcggctcatatcccattccccctgtgtctttttttaaacacggagggagccgcggttaaaaacaatatgtataaaatggctgacctgctcattataccattcggatggggcggaatgctcagtcatttcctattccagaataaaatgccttgtttgtcgcaaattaaaataactgatggaaaggggggaacattgtgacgatacatgcggagctcggcaaaaaccttgaagtgctgaaaaaacggttcggccaaagcgatgacatgatgttttattcgtttacgtatggaaacggcaaatgtgacgcctgtcttatctatatagacggactgaccgacaatcaattgcttgcagaatatattatttcgcccgttcaggcggccgcccggcatcaagaggaaccggctgaaacaccgccgtcatccatctctttcggctatcgtcatacccggctttcttcacttaaggacgcggaggcagacattttctccggcaaatcggttttgctggcggagggatgggaggaagccctttcgtttgagacggaaacatttaaaatgcgtgatattgaagaaccgtcttcagaagtgcttgaacgggggccgaggataggttttgtcgaaaagcttcggacgaacacggcgcttttgcgcgagcagtccggtgatcccaacctccagatcaaagagatcacactcggcgaacggacaaaaaagcggatcgccgttgcctacattcgggatattgcccctgatgatgttgtaaaagaagtgatgaaaagactggattcgatcaccattgatgacattccggaatcaggagcgatcgagcagcttattgaagataacacgtattccattttcccgaccgtcttgacgaccgaacggcccgaccgggttatgggcgctcttttggaaggaagggtttccattcttgtagacggaacgccttttacccttttggtgccggctaccgttgatgaatttatccactcccctgacgattataatcagcggtgggttccggttacctttctcaggctgcttcggtatacatgcattttaatcacgatttatttacccggcctttacatatcgctcgttacgtttcacacggggctcttaccgacgagaatggcggttacgattgccgggagcagattgaatgtcccgttccctccttttgttgaagcgttcatcatgatttttacgatcgagatgatcagagaagccggactcaggctgccgaagccgatcggacagacgatcggcctgatcgggggcgtggtgatcggacaggccgccgttcaggcgaatattgtcagcgcgatgatggtcattgtcgtatccgttacggcgttggcttcttttacggcgccctcctatgcgttcaattttccgctgaggctcatccgtattttttcgatgattttgtcggcgatattaggtttatacggactgatcatgtgctatctgcttgtcgtcggccatctgatgcgtctgaaaagcttcggtcaggactatcttattccgatcatggcgcagcctggccaagacttaaaagatacgatcgtcagactgccgacgcctcttttgaaaaaacggccgaccagaaaagagacgaaagataaaatcaagcaaaggtgatccccatgaaaaaaccggaagacaagctgtcgtttatgcagacacttctcatggtaagcggaacaatgatcggagcgggcgtgttaacactgccgcgctccgccgcaacagcggacagtccgagcggatggatcattattcttgtgcagagtgtcgtgtttatcggcatcgtcctgctctttatgccgtttttgcagaaaaacagcggggaaaccatttatgagctgaatcaaagcatcatgggccgcgccatcggttctcttctgaatttattcatcagctgttattttgtcgtcaccgtctgttttcaagcccgttttctcggtgaagtcatcaattactttttactgaaaaatacgccgatgggtgtcgtcatattcatctttctggcggtcggcatttaccatgtgaccggcggggtctatcccatttcaaagctttatgcctatctgtttccgattgcgatcgtcatcctgattacgctgctcatattcagtttgagactttttaagctggatttcgtccgcccggtcatggaaggaggctacaaaagcttttttgagctgtttccgcaaacccttctgtatttttcgggacttgaggtgattctttatctggtgccgtttatgaaaaacccgaagcaggcgaaaaaggcggctgtcttcggcatcgcaggcgcgagcattttttacagctttacgctgcttgtcgtcatcggctgtatgtcggtcgctgaagccaaaacggtgacgtatccgaccatatccctgattcatgctttggaaatccggggcattttcatagagcggtttgatatctttcttttaattacgtggacatgccagcagttcacctgtatgctcggttcttttaaaggggcgcatctcggattaaacaccattttcaaactgaaaaataaaaacaatgcctggctgctgggaggcttattggcagtgacattcggcctttcaatgtaccccgatgatatcaacagtgtgtttgcattcgcgaatattctcggatatgcgttttttgccgtcattatgattccttttctcatctggtttgtcagctggatgaaaaaaatagccgggaggaaacagacgtcatgacacttttcatcaaatgggcggcggcgcttttcatactgatgacgctttcaggatgctgggacgcgaaggaagtcgaaaagctgtctttcgcccgggggctggcgatagacgagacgagtgaccgccgatataaattaacctatcaaaacctgctgccccaaagcgaaaacagccaggcttccggccggcccgtgtttgtcaatgtgacgacgcggggggataccattcttgaagccgtcagtgaagtcgctttaaaagatccgcctgtttacagcgatcacttaaaagtgctgatattcagcgacaaattgctggccgaccaaaatatactgcagatgatgaatcattttatccgcgatgatgaattaaggcggagcagctatctcttcgcggcaagaggaaaagcgtccgatattctgacggagccgacgccgaatcagcagcagcccatggccgcggaaaagctgatcgaccttacgaacaacggcggctacaacgggaagattttacaaccgctccgaatcgggagagcttcgatttactgccataataaactcagttttctcattcaggccgtcagcaatcaaaaaggaaaaacggtgtatgacggagcggccattatcaaaaacgcaaaacaaaacagattggcgggctttctgtcatcatacgaaatacagagcctgaattggctgatggggacgatacggggcggcgtgctgcccgctttggataaaggggggcacccgattaccttcgagatcaaaaaatcaacatccgtcatcactcccaggctgaaaaacgggaagctgtcatttcatgtagcggtaaaaacaaaaggacttttgtcagaggatcaatatgccggagaagattcattcgatcagcactatttaaacgggctggaaaagattttcgaaaaaaaactgaaaagcgatgtgaaagaagtcatcgataagctgcagaatcaatatgaaacggaccctgtattcttttctgacagagtccgcattcaatatcccgactattggaagaaagtaaagcatcattgggatgagaccttctccgaagcggcttttgactatgatgtttccattcagattaccaacttcggaacgatgggacggtagccttcagcctgttttttcgacacggaggagaatttgataaatccggctttgttcgggcagctgtgtcaccggaaattgcatcgattgcgccattcgtgtgatttcctgtaaaaacagctgcacccgctcatccacgtgaacatacgtataggactgctttttcacagtaaatgtctcttccggaaagagcgtgcgcaccgtctgcggcgtaaaaaaccgcaagtgggtgcggtcgagaatgccggcgtctctgtatgtccagttaccgagcagaagcgggaacagcgcttcggcgtgggaaatattcggaatgctgcaaacgattgatccggcaggcgacaaataggatgagtacgtttcaatgacgcgccacgggtcttttaagtgctcaaggatgtccgcgaaaatgatgcaatcaaaaaagccttccggataaggcagcttcacttcttcgacatcttcctgcagaaccgctttataatgcccttttgccgcttgcgccgccagcgggtgcagctctattccgtacagttcgcaaggctgtctgttttgaagttccagccccgtagctcccgcgccgcagccgacatcaagtatccgtttcgcctcccggggaacgagctccgcaatttccggtctcggatgagtaaaatacgtaaaatcagtgccccatttttccgtaaaacgctggcggttctccgaatataactgattgatattgatatcctgattagccgtaaacgtcgcgtgaccgtggtgatgcacaaaggcatcgagggcgatgtgcaggctgtagcctttttgcagggcgcgcagacataggtcatcatcttcaaaagaaccgtatccgaattgttcatcgaacgggccgatgtcttcaatgacgcttcttttcactagaagacagaaaccgacaaggcgcagcacccgctttgtatgatgcttttcccgttcgcaatacgcctccgcgaatgactccagctcatcaagcgattgatacgcgtcatggatcatttgcgcgccgctgacatagttgctgacgggcccgaccataccggttttttcagattgatacagcaccctcagcatggaggtgagccaatttttcgtgaccatcgtatcgttgttcagaaacagcagattttctccccctgccgcttcgattccctggttgcaccccttggcgaacccgaggtttttttcatttaggatgactttgacgtcaggcagatttgatatgtattctctcgttccgtctgaggaaccgttgtcaactataatcagttcaatcttatctttgtcggtgtatcgttcaatgctggccagacattttttcgtcagctcaagttcattatatgtaaggataataatactcgttttcaccggcatccccgcctttatcgtgactttatacaacgtatgacatatccccgtcatttatgtgaccgggcgcccgctcggcatccgttttgagggggccggtgaataaccgcccccctaaaactgaatattacggatgaactgtccgccgatttgattctgatcccgagcctccgttacggcttttcagatcctgctcaatttcttcaaggcttttccccttcgtctcggtcactttaaaccggacgaacaggaatgccagtatcccgatcgcggcataaatgagaaataaatagctgatgccgactgcttccattaacatcggataggttaatgagacaatcaatgttccggcatgcagcatcaaagtggagacacccgtcccgataccccggacatgcagcgggaataattcaggaagcatgacccacacagcaggcccccagctgaccgcaaacacaatgataaacaggcctaaacaaatcaccgttgtccatgatgcggctgctgaatgttcaaagaagagattgaccgcggccaatacgagcaggctgatgaccatgcccgcatttccggccagcagcagcggcttccggccgatcttatcaatgactttaatagccgcaagcgtcatgatgacattgacggcgccgattccgaccgttcccaatatagacgcggaattgccgaacccgacactggtaaatgttttcggggcgtaataaataattgtatttgtcccgatgaattgctgcaaaaaggcaagtccgaggccggcaatcagcgcgggtctcacccacggctcaaacaattctttcaagccgccttcgttttccttttccgcttctttcatctgatcaatctcatcatcaatattcttcgttccccgcaatgatgaaaggatttcacttgctttctcttctttgccgatcgtaaacagccagcgcgggctttccggcataaataagattccgatcagcagaatgactgacggcacaaccgcaagtccaagcatccagcgccaagcgcctgcatcggcaaatatatagttcacgatataagaaacgaggattccgaccgtaatcatcagctgattcagcgaagaaagcgccccccgtttatgcttcggagccagctccgataaatagagcggaacgatcgttgtagatgttccgacagccagtccgagaatgatccggaaaagaaccatcacctctgtattcggggcaaaagcgactcctaaaccgcctatacaaaacagcagcgccgctcccatgatggccttccgcctgccgaaccggtcggtcagtttgccggcgaatcccgacccgagaatcgcccccgccaataacgaactgacaacgaggccttctgtaaaggcgttcagtcccagttcttttttcataaataaaatagctccggaaatgactccggtatcatatccgtataacgcgccgccgagtgcgccgaaaaaatagagccatttattcgagtgtatgcttttcatgttatgtagactcccttcatccaacgctgtaacgcgcggaattgttctactgcttcttttgcctgtttccgtccgtttcaaaccttccgcaccgttaatatccattattttactaattattttttacaaagcgacgaaacatttcccgcttcctgccgtccaatataatgtgaacctgatgcaaaaataacagtagatgttgtcgaaatagagagaaagatttggaattttctcatttacagagttgctccaagtcaacaattatggtacgcttcacaaagaatagaaacgagaggtaatgatatggaagaacgatctcaacgcagaaaaaagaaaagacgcctcagaaaatgggtgaaatttgtactggtattcgccgctttcttattggtgatcgccggttccgtcggcacctacgcatttgtgaaattgaataatgcgaccaaagaagcgcacgtcagccttgaccgcggcgaccagtccgtaaaacggatcaaagaatttgacccgaagaaggattctttcaccgtattgcttttaggaatagacgcccgtgacagtaagggtgaatcagtagatgacgcaagaagtgacgccaacgtgctcgtcaccttcaaccggaaaaagaaaacagcgacgatgctcagcattccgcgggattcctatgtcaacatcccgggacacggctatgacaaattcgcgcacgcacatgcttacggcggttataatttaacttataaaacagtagaaaacatgcttgatattccggtagattatgtggttgagagcaacttcgacgcgttccgcgatgtcgtcaatgagttgaacggcgttacggtaaatgtgaaaagccagaaaattgccgatcgtattaaggtcgatacaaaaggaaaagtcgtgctgaagccgggcgtccagacgcttgacggtgagcaggcactggcttatgtaagaacacgcaaagccgacaccgatctgatgcgcggacaaagacagatggaagtgctgagcgccattattaaaaaatctaaatcgttaagctcgatcccatcttatgacgatatcgtcgacagcttagggaaaaacttaaaaatgaacttatctcttaatgacgccatcggtctgttcccgtttatcacatcgctgaaatcggtggattctttgcagctgacaggttcagacagctatatttacactcctcagtacggcaaaaatatttattacttcaagctgaatgaggaaaaccttcaagaagtgaaaacgaaattaaaaaatgatttaaacgcgtaagatgtcacggcggggttagcaaatcccgccgtttttctgttgaaaaaaaggacatgaaggtatagccttttaactgacggctttctgctgatttcgcacaaagctgaacatactacatgaagcagctttatttttaaggagggcatccatacatatgaaattgatagccattgacttagacggcacattactgaactcggacagtgtgatttctccggaaaacagagcggctttacaaagagcggatgaagcgggcattctcgtggccatctgcacgggcagagccacatttgatgtaaaagcgctcttaaaggatttggatattccgatcattgcggcaaacggcgggacagtccatgacaaaggataccgcctcgtcagccggctcttaatggatcagcaggccgggaaggatatcgccgcttatttaacggacaacgacatttactttgaggtctatacagatgatcatctgctgtccccgtttgacggcgagtccaaactgcaggcagaactggacattctgaaaagcgccaatcccaaggaagatattcggacattatgggagggcgcaaagacgcagttcaaacaattcggcattaaacccgtgcaggatatacaggcgatttttaacggagacgaacatgtttacaagcttctttgtttctcttttgatatggaaaaactgagaaacgccaaagaagaaattacacatcatccgaaattatcccagacatcttccgggaaacacattatcgaaatcctccctgccggttccggaaagggacgtgctctgacggagcttgcctcactgtacggaattgaaaaacaggatatttacgccatcggcgacagcccgaatgatttctccatgtttgaagcggcgggaaaccgcatcgcaatgggcaatgcgattgatgaactgaaggaaaaaagcacgtatattacaaaaagcaacgatgaaaacggcgtcgcatatttcatcaaccggcttctcgacaacgagcaataaaaggcaaaagccaggtctttcacggcctggcttttcacgtttcccaaaaaaggaattcccaaaaatgaaaataaattgtaagataaagaaaaaaggagtttcatgatgtcgaatgcaatcgctattataggatgtttagcttttctctgcgcagtcggatacggaatattccatctcatatgcaaagcggcaaaaaaagacaaacatttttcaaaaaagctgttttggccccttctcatcggcggatttatcctgcttctgaccggcgcctccctcgcagagccggacgcctcggccgtgaaggcagaggagaaatacagcacccttgataccgcttatcaaaaattgacgaaggaacaccaggcgcttgagaaaaaatatgaaaacatcagtgccgcggccgaaaaggagaaatccgaagccgaagccggcaatgaagaaaaactcagcaaactcagccaagagataagcgagctgaaaaaaacaaacaaatcactcaaacaagacaatgagaaattaaaaaattcacaaaagaagctcgaaaagaccgctgaaacgcttcagtcagaaaataaatctttaaagcggcagaaagcagaaacaaaaacatccgaaaacgcggaaacggcgcaaaacaacgccccttcctccggcggacatgccgagacgaaagcagccggcacctcacagggatgcgacattaaaggcagccggaacggcatttatcacacgccgggaagtacatactacgaccggacgacagatcccgcggaaatgttctgttccgtagaggatgcggtagcggccggatacagagcgccgaaacggtaaaagaaaaagacgtcagagacactctctgacgtctttttttacgggagccggatgctgcccgcatatttgtccttccaataagcgcttgtgttcatatttgttatggtaacgcctgcggacacggtgacatgaatcacttgtccgttcccgatataaatggccggattcaggctttccgctttaaagaagaccagatcgccgggcttcagatcttgtttatcgaccggaacgcccgcctgcatctgcttgtccgcataacgcggcaggctgattcctttcactttttgatagatgtattgaacaaatcccgccgtatcaaagccggtttccggtgaaacgccgcctttcagataagaaattccgatatgatcggccgctgtggacacaacgggattttctttagaaatggctaaattgctgaatcggcgcacccccgtaaaatgttttttccaataatcttccgacaagtaagaaatggtgacttttgcggagcggcttgcttggatgaaccttccctctcccgcataaatgcccgcatgggaaattccttttttatacgtgtcgctgaaataaatcacgtccccgggctttatgccgctcagtttgattttctcaccgaccagccactgctgttccgctgatctcggcaggtaaatgtgaagcttgttttcaaaaacatattggaccagccccgaacagtcgaatccctcctcgggcgtgcttccgccgaatacatacggaatgtcgaggtaacgggctgcctcctgaacgatcgggtcatcagccagttccggatcttttgtaatccgctttgcgccaagatataaattcatccaataactgcttttttgaaaccgtgtgacggttacgccttctgacggagaactgtgtatcatctctccgtttccgatataaagaccgtcatggacgggtgcattttgtgttgaatccgactttttgaaaaacacaagatctcccggtaaaaggtcattttctttgacggcggttccaatcttccattgatcacttaccgttctcggcagatggatgttctgcctgctgaaaagataatgcatcaatccggacggatcaaaaccgtcctcaggctcttcgcctccgtaaacatatttatttccgacaagtttttgcgcgtctgaaaccatcaggacagaaacttgagaatccgcttcagcaatttccgttctcgttactgcgggtgccacaagacaaatcataaggccggcaaggatgtacttcctccagcttgtgagcatgttttctattcactctcctcatttttagtagtttttacatcggtaacttttaacaaatgtttaggagagcacacaaaaaaagaatgcccgatatgggcattctttactggattcggaacaaacaatatgccggcaagcggaatcatgcgcttattttgcgctcgctgtgtcctcttgctgaatcttttgcatttccgtgtcaattttttgtttttcctgatctgtgagctgatcattgtatttaaacgctgacataaacataaataccataatgatcgcggcaaacggccatcccgctttaatgattttcatttgtttttcactccgctttcttttttaagatatcgctgtgatccacatcaaacgttaattttccatccttgacgctccaatcgaaattcgattctttcgtcagttcacgtacgatcgttttatgattgatgctgccttttttaaccggtgcaggcgttgcttcatgaatattcatcggcgtgacttcaaagcgtcccgtgccgtttttctgcagatgatattgaacaagcgccgtgtctctcgttcttgtccacccctggtcgaatacgaagttgcccaggctgtagaaaataacagtgccgtggtacatttcgatcggttctagcacgtgcggatggtgtccgacgataatatccgctccggcatctgacattgctcttgccaattggcgctgtctgtcattcggatcattatcgtattcctgtccccagtgtgtttgaacaatgacaagatcggctttctttttagctttagaaatcatcggaataaacagctctggatcggccggaagcacacccggcgcatttcgtttagctgcaaagccttttccggaaacatcagtgaaacccagtgttgcgattttgattccgtttacatcttgataagaaatgttctgctcggcttccttcagcgtgaggcccgcgccgacaagttcaagattttgctttgaaaactcttcaaccgtatcccgcattccttgagggccgtaatccatcgcatggttgttggctgccgtgagaacggtgaaattcatgtccttcaatacttttacggcatctttgtttgactgaaggtggatatttttttctgcttctttgtagttctttttatatgtaaccgggttttcaaagttccccgacacatagtcggatgcttcgaagaatggctttgcgtaacggaagacactctccgtgcctttatgctttgtcactttctcgacattccggcccatcataatatctccgacgaatgaggctgatacaaggtcatcggcatttcttttcacactcggcgtttccgccttccctgtcaggatgcagacgaacatcaggcaaaagacgatcggcagcgcgataaaaacgtgaagattggtcttctttttctgctgtttggtcagcttcagcagtttttcttgaaagcttaattgttttttcatcgtttgacacaccttacattagattaagtagtaagcaaacataatggcaaaagttgcgccgcttaagaacagcgtgctggcaaatgtaatcgttaatccctgtttctgaatggtattggcgatcagacccggtacgatgataccgattccgcggaattctgatatctcaaacggtacgatcgggtaaaggaaatcaagggcgatttttaagcagattcccgttatcagcatagctgcgaattttctgcgtccgtacaaaatcataaatctggataaaccgtatttgacgatcacgtatgtaagaagactcactaacaatacgagtaaaataaagaccggctggttaaaaacgagccctaaataacccggcacgactaaaccggcaggtacgatacctgttttttccgcgaaaattaaactgattaacacgcctaaaataagtgagatgtataaatctgatccaaacatttatccttttcctcctagctaacgagctgtttcaccttatattcttgaattttttcaattaatggttccgctgaaccgtggatattgccgacgccatatatgacacggttttgcattcttgttttcagcacgtccatgatttcgtctgttgatttatattccaggtcgtgcaatgtatcggcaggaatcttgccttcttcataagctctgacgatcggttctgtcgtctcgccgatgagtatgagttccttcgttttaatgtacggaagcacgtcgtttgcgaactgaatcgttctgtccacacggtcggcgcggcagttcatgataacgatcggttcatctgtcgggtagccgatttcctttacacgtttccatatatttaaagtagaagatgcatcatttgcggcaaagccgtttacgaaatgaccgggctccttcgtgctgagcagcggcaggattctcatggcgccaggatcaggcggcgcattcagcattcctttaaacgccgtttcttcatctatcccaagagcctgggcaacgccgagcgcaagggaagcgttatcaggaaagaccatatattcaaattttcgaaggtattcatctgtaattttagagttatccgcaataatgacctcggtattccgctctgcggctttttctttaaagaagtctgtgtattcactgtctgtaatgacaaggtgaccgttgtacggtatcgtcgcggtaaatgcttcagcgatttcatcaagcgtcggccccatgacgtccatatggtcttcaagcacattcacgatgacgccgatgttggcttgaaggagttcttcctgaaagataatctgataatccgggtttaccgccatacattcactgacaatggcattggcgccccgttctacggtttccttcattacttctttttgctcgccgatattcggaccctgcggtttccgtttgatcggtttctcctcaggtgtatcccaatagatcatccttgcatctgttcccgtcgtttttccgactgttttgtagcccgcctccatcagtattccggtcgtcagcctcgttacggttgactttccgcggataccattaatattgacgcgtactggcagggcatcgatattcttctgatgccgccttttttcaatgattccgatgattagtacggcagcacaggctataatgagtaaccacattgatttttgacatctccttctgtattgataaattcattcatcagtatatagcttcactatgaattctcaatcggcattatgtaacataatcttcccgctttcactgagccaaacttctctattagtgacgctattcttcctattatcgaattgctttttttgggaataggcaggacttcaaccttacttcaatttttcaaaagaaaaatgaatgcgtttacattttcacacagaaattcatttggaccaatggaactattcgcgttccggaagaaaaagatgtaatgataatccatcttttccagcccgtttgtatcagcgtttttcgcactgcgcatacgtttcgggactctctgtccgctgtgtgcagactacctgttttgttaaggataaggtcttaaagtcattcatttttcccccgtatcctgctttcagtcccattccaaaataactagcggaatgactggtacatgacagaaaaagacgggtccggagtgtttacaagaaatacacattttatatgcggaaagcctttctccttttaaaccatttacaggacgtttatcactcttttgaaataattttaataaatctttatattcgttcaagaaatattcatccataattgtgaagttcttggtaaaacatcgaggaactcctctattttataaaatgcataaaaaaggaatacccgctgaaaactacagataaccaggaaaggaggcggtctgatgtctgcggataaacaaaacaaacggattcccggcgattttgaatcggctgtacgggaaatgcaggagctgatgtgtgtttgcggtgattttaaaatacgaaggatcaaactgcaggaccgtcataccgctttcttttatattgaacaaatgatagaagaacagaagctgaatgagtttctgttaagcgacaccctgcagaacggcccgcttgaggaaacgatgaatgccgtcagcagtgcggaaacggatgaaaccagaaaactcattgacgggattttggccggccaggttgtttttctcagcgatgcatcgaggaaagcgaagctgttttccgtcgggcagaatccgctgcgttccattatggaacccgaatctgaaagtatcgtccgcggcgcccatgacgggtttgtggaaagtttggaaacgaacattcatcagctgcggtttcacatacaggaccgccatctctccgttcattatatggatatcggggaaagagccaaatcaaaggttgcggttatctttgttgagaatatcgccaatccggagattgtcgaggaagtgaagcggcgcctgtcatacttgcgtatagacagcgtgcttgcgcccgggattatcgaggaatcaatagaagataattcgttttccatttttccgcagatcattcatacggaacggccggataaagcaaaagcatgcgtgatggaaggctgtgtactgatcatgatggacgggagtccgtcggctttgattgcgccgatcacattcttttccttttttcaatctccggatgactacagcacgaggtggatttctgccagttttttaagagtgctgagatttttcgcctttatgatcgcgattacgctgcccgctttttatatcgcgctgattgcgtttcattttgaagtcattcccaacgatctgattatcaccatgaaaaattcgattgttgatattccctttcccccgctgatagaagccatgattatggaaattacgattgaactgatccgcgaagccggtatcaggctgccgagaccgatcagtcagacgatcggcattgtcggcggtctcgtgatcggtgacgcagtcgttcaggcgggactcatttctaatatgatgattatcgtcgtagccgttacggctgtttcttcttttgtgcttccttcatatgaaatgagcacgtccatccgaacgctcagatttccgcttatgtttctggcatcctcgttcggttttatcggcatcgcactcggcttcgggcttattctgatgaacctgtgcaagcttgaatcactcggcgttccttatttatcatctctgacgccgtttcatttcagtgacttgaaggatgcatttatccggctgccggcttggtttattaaaagaaggcctttttatttgagaccgcaagactcaaagcagatgaaacatgttcgggggtggagaaaagatgaagcctaaaaaaatcagccggcttcaaggcgtgtttttcattaatcagacgcagatcagcatcggcattttggcgctgccccatttactgatgatgaaatcgggaagcagcggatggatttccattctgcttaccggattgctcgtccagcttacattcagcctgtatatgatattatttcaccggtttccgaagctgaacctgtacgaaatgctggaggaggtgttcggaacacttgccggcaaaggggtgcaggtgctgtatattttatatttcgcgtttctctgcacgctcattctttctgtatttacacggatattggatatctgggtgctccctcagactccgaattgggtgatcagcttaatgctgatcctcggttctgtctatatcgcccaggctccgctgaatgcgatcgccaggttcagctttattttaacgccgtttttgctgctgatctctctgccgcttttatacacgctgggaaaagccgatatcacatacattatgccgatttttcacggaaccgcaaaagacatgctgaccggggtgcagcaaacacttgtcagcattaccggctttcaggcggcgctcgtgatcgggcccctaatcaactgcaccgtcagccagcgctacaaaatactgacgatttcaaacatcttgattatcctttattacctgtatatcacccttacttgctttgtcacaatcagccccgaagaaataaaaatgatcccggagcctgtgctgtacctgttaaaaaccgtttcattcagaattatcgaacggacggatctgctctttttgacgttttggttcgtgaccgtcttttcaacgctggccaacgtgttttacttggcaagcaccggcattgccaagctgttcaatcaaaaagatcacagccggtttgtttatccgctggccctgctcgtcttccttctgtctatttgggccacaagcacagataaaacgatacagcagctggatcagtttttccgcatttccgatattgtgtttgtgtatttgtttccgttgtttatggtattgattgtccttgtacgcaaaaagggtgtccgccatgcgcattaaaaaagcggttcttatcagtctcatgtgcgcaagcctgacacttgcgggctgctgggatcaaaatttgctgaaagatatttctctcgtgctgaccgcaagccttgatgttgatcatgacggtaaaaataaaatcggcatcacctatcggaaggttcagtcctcccaggcggaacaggaaacgggcggctcattcattacgacggtgctcagcgcttccgggcacaccatccgtgaagcgcggtttcaattggataagcttgtcgatcagcgcattgacacgtccaagcaaagagtcttattaatcggtgagaaaatggcggaaaaaccgctttttccttatctcgatgtcttttacagagatccgaaaagcccgcttctcgctcatccggcggttgtaaaagacggcgaggcgattgaagtgctgaagctgatcgtccggcagaaattgatcgtcagcaagtatttaacgaatttattaacaagcgctaatgcggaatcaaatatcagcatggaaaatttgcaatccatccgttcaagcatgctgacggctgataaggatttcgcccttccttatttatcgattaacggacagacgataaaggtagagggttctgccctgttcagcggccagcgaaaagtgactgaggtgctcggtcaggattcgaccctcctgacccttttaagcgggcaatttaataaatcggctaatattaatctgaagctgtgggacaaatacaaaatggatattgaaaattatctttctctcggcatcacggatgccacgcgaaagattgtatttatagatacagatccgcagcatataaaagtgaaaatccgtttaaaactgaatgcacgcgtcttggaatatccaaaggacaagctgaattcttatacggcaatcgaccaaataaacaaacaagcctcagcaaatttgaacagccaggccagatcggtgatcagccatattcaggagcacaattcggatatcctcggcatcggccggaaatatcaaacccattattatgagcggggcaagcggctcaattggcgtggggtctatccttccatcgagataatccctgatattaaagtgaatatctcacaaatcggcatcgtgaactaaaagagaccccggtctctttttttgttgccaaccgaaatgattcgtgttactctttttatgtaaacggttacatagttgaaggaggagtgtttgttggcaacgattaaagatgtcgcaggcgctgccggcgtctctgttgccacggtttcacgtgtcctcaatgacaacggctacgtgcatgaagatacacgaacgaaggtcatgcttgccatggagaagctgaattattatccgaatgaagttgcccgctctctttataaaagagaatccagactggtcgggctcttgcttccggatattacgaatccctttttccctcagcttgcccgcggcgctgaagacgagttgcagcgggaaggataccggctgatcatcggcaacagcgatgaagaattggaaaaagaactcgactacctgcaaacatttaaacaaaatcaagttgccggtattttggcggccacccattaccccgaccttcccgaatacagcggcagcctttacccggtcgtatttctggaccggacaaaagaaggcgccccatccgtattcagtgacgggcgggcaggcggaaaacgggcggctgaggaaatgcttcgcggcaaaagcacaagcatcacgcttgtcaaaggcccagcccaccttccgaccgctcaggaacgttttaacggtgcacttaacgtgctgcaaaaagcgaacgcacagttcaatgtcatctccgccgcttcattttccatcaaggatgccgccattttagcagaagaattgtttgcagcataccctgaaaccgacggagtcattgccagcaacgacattgcggcggctgccgtcctccatgaggcgctgcggctcggcaaaaaagttccggaggagattcagatcatcggatacgacgatattccgcagagcaggcttttgtttccgccgctttcaaccatccgccagcctgcatatgagatgggaaaacaagcggcaaacctgctgctgcaattgataaagaaagagccgccgaaagagacggccattcaaatgcccgtgacttacataagaagacaaacgacaagaaaggatgatcaccatgagtgaaatttgtgttatcggaagctgttctatggatctggtcgtcacatctgaacggcgtccgaaagccggagaaaccgtactgggcacagactttcaaaccgtgcccggaggaaaaggcgcaaatcaggccgtagccgcttcccgcctgggcgcaaacgtatatatggtaggaaaagcaggcaatgacagctacggaaaagcgattattgaaaacctgaaggcaaacggtgtcaatacggactatatggaaacggttacacataaaaaaagcggaacggctcatattgtgctcgcagaaggagacaacagcatcgtcgtcgtaaaaggcgcaaacgatgacatctcccccgattatgccaaaagtgcgctggcaaaacttcccggcattgatatcgtgctgatccagcaggagattcctgaagaaaccgttgaagcagtgtgcagctactgccgcgcgcagcaaattccggttattctgaatcccgcgccggcccggccgctgaaacaatcgacgattgaggatgccgcatatcttacgccgaacgaacatgaagcatccattttatttcctgaccggacgaaagaagaagcgctcgccggctatcccggcaaactgttcattaccgaaggaaaacaaggcgtgcgctactcagacggcaccgcggaacggcttgttcccgccttccctgccgaagcggtcgatacgacgggagccggcgatacctttaatgcggcacttgccgtcgcactcgcggaaggacgggacattgagcaagcgctcctgtttgccaaccgcgccgcctccctgtccgtgcagcacttcggcgcccaaggcggcatgccggccagaaaagaagttgaggagctgctgtcatgaaaaaacacggaatgttaaacagccacattgccaaagtattagctgatctcgggcatacagacctcatcgcaatcgccgatgcgggtctccccgtccctgacggcgtccctaaaattgatttgtccttaacggcgggcgttcccgcctttcgggacgtgaccagcctggtagccggggagatggcagtcgaaaaggtgatcgccgcttccgagatcaaagacgcaaatcctgagaatgcaagtttcatagaaagccatttctcagcgcagacgatcgagtacatgtcccatgaggaattcaaacggctcacacagaaagcaaaagccgtcatccgaacgggtgaaatgacaccatacgccaactgcattctgcaggcgggtgtgattttctagaaagaagggatccagcatgcacatcggcatgacagacattcataaagcattcggcaaaaaccaagtgctctccggcgtctcatttgagcttctgccgggagaaatccacgctttaatgggagaaaacggagcgggcaaatcgacgttaatgaatctgctcaccgggctctaccggctcgacaagggaaacattacgataaacggaacaaacatgaacttctccaatccaaaggaagccgaaaagcacggaatcgcctttatccatcaggaactgaatatatggccggacatgacggtgcttgaaaacctttttatcggcaaagagctgacgacggcattcggcgttttggaaacgaagaaaatgaaagcgctagcaaaatcacagcttgaaaaactgggagtctctcttcctcttgaccgggaagccggacaatgttccgtcggacagcagcagatgattgagattgccaaagcgctgatgacaaacgccgaagtcattattatggacgaaccgaccgcggcgctgaccgaacgggaaatcagcaaactgtttgacgtgatgacggcgttaaagcgggacggcgtatccatcgtctatatttcgcaccgaatggaagagatattttcgatttgcgaccggatcaccattatgcgggacggcctcactgtcgatacggcgcatatgaaagaaactaattttgatgaagtggtcaaaaaaatggtcgggcgggagctgaccgatcggtatccgactcgcacgccgtcactcggcgataaggtgctcgaagtgaaaaacgcctcaaaaaaaggaagcttttcacagatcagtttccatgtgagcgccggagaaatcctcggcgtttccggcttaatgggtgccggacggacagaaatcatgagggcgctgttcggaattgacaggctcgattccggagagatctggatttccggccgaaaaaccggcattcggggtccgtacgatgccatccgcaagggactcggcctgattacggagaaccgcaaagatgaagggctgctgctggatacgtccattcgtgaaaatatctcattgccgaacctgcccagcttctctccgaaaggcatcattgaccgaaaacgcgaggcggagttcgttgagctgctcatcaagcgtctgaccattaagaccgcatctccggaaaccgccgcccggcatttatcaggaggaaatcaacaaaaagtcgtcatcgccaaatggattggaatcggcccgaaagttctcatccttgatgaaccgacaagaggcgtcgacgtaggcgcgaaaagggaaatctattcattaatgaatgaactgaccgatcgcggagtcgccatcatcatggtgtcttccgagctgccggaaattctcggcatgagtgacagaatcatcgtcgtccacgaagggcgcatcagcggagaaatcaatgcggccggcgcaacacaagaacacatcatgacacttgccacgggagggcagcagtatgaaaactgaaccaataacatcaactgaacaaaagcgattttccattcacaccttcacgcaaaaactcggtccgtttctcggcttactgattcttgtgctgatcgtttccgttttaaacccgagttttcttgaacccctcaatattctcaaccttcttcggcaggttgcgattaacgctctgattgcattcggaatgacgtttgtcattttaacgggaggcattgatctctctgtcggagccatcctcgccttatcgagcgcattagtcgcaggtatgatggtctcaggcatcgacccgatcttagccgtcatcatcggctgcgtaatcggcgccgtactcggcatgataaacggattattaatcacaaaaggaaaaatggcgccgttcatcgccactttggcgacaatgaccgtctttcgcggactgaccctcgtctatacggacggaaatccgattacggggctcggttcaaattacgcatttcaattattcgggcgcggttattttctcggcattcccgtacctgccattacgatgctgattgcatttgcggccctgtgggttcttctgcacaaaacaccgttcggccgccggacatacgccatcggcggcaatgagaaagcggcgctgatatcgggaatcaaagtgccccgcatcaagatcatgatctattctctgacaggtttattatcggcgctggcgggagcgattctgacatcacgcttaaattccgcacagccgacggccggggaatcatacgagctggacgccatcgcagcggtcgttctcggcggaacgagcctgtccggcggtcgagggcgcatcatcggtacgctgatcggggttttgattatcggtacgctgaacaacggcttgaaccttctcggcgtatcatctttttatcagctcgtcgtcaaaggaatcgtcattttaatcgcggtgctgctggaccgcaaaaaatcggcatagtaggaggaccattatgaagaaagccatcatcacgatcgcggcattatcactgtttttgctgtccgcctgttcacttgaaccgccacaatgggcaaaaccgtcaaacacaaaacataaaaaagaattcactatcgggctctccgtctccacattgaacaatccgttcttcgtttcattaaaagaaggcgttgtaaaggaagccaaaaaacggggcatgaaggtcattattgtcgatgcccaaaatgattcatctaaacagtcaaatgacgtagaagatttgatccagcagggagtcgatgcgctgctgatcaatccgaccgattcctcagcgatttcaacagccgtcgaatcggcaaattccctcggcattcccgtcattgcgcttgatcgttcagccgaacacggcaaagtcgaaacgcttgtcgcctctgacaatgtcaaaggaggagaaatggcggctgactacctcgccgaccagctcggaaaaggcgccaaagtggcggaattgcaaggggtgccgggcgcatccgcgacacgggaacgcggaacgggctttcatcatattgccgacaaaaagctggatgtcgtaacaaagcaagcggcggattttgaccgtacaaaaggattgaccgtcatggaaaacctgctgcagggacatccggatattaaagccgtgttcgcccataatgatgaaatggcactcggcgcgctcgaagcgattaacagctcgggcaaacacattttggtcgtcggtttcgacggaaataaagatgcgatttcttccattaaaaacggaaagctgacagccacggtcgcccagcagccggagctgatcggaaaactggcggccgaagcggcggagcaggtgctcaaaggagaaaaagtcaaaaaaaccatttccgctccattgaaacttcaaacacaaaaataaccggccgatgtttagacttccggtaaaacgtgaaaggatgaagtaaaaggagagatacagatgaagaaaacagccaaagcggcatccattctgacccttgcagcgggaataacagcggcttcagctgccggaataacgcctcttccggagacacacgcgcaagaagcggtcaaaattgacgatctgtacagctacccgcttgactcttatctcgtttccgcggaagcattgaacgtcagaacaaaagcatcagcagccagtccgagagctgatacccttcatttaggcgacagcttaaagatcgtttcattccagaacgctgactgggcaaaagtacattataaaaacggaaaaacaggatttgtatctactcattatattgttaaagaagcaacaaccgtaaaaacgacggcaaaaacaaaagtatatacagacaaacaagcggtcaaagcttcccttgctaaaaacacgagcgtttctttcctcggatggaaaaagacatccggcggcggcattgatttcggctgggcgcttgtcgattacgggggcgcaacgggatatatcagcacaaaagatctgcaaaaactgacataatatcaaaacggatttcgcaaattcagcgcgaaatccgttttttctttcttgagcagtcagaaacgtctaaggttcgaaatatttctcaggaaatattgtcggatgaagatgaatgcatacaactctaaaatggcttctttatgtaatccgccaggcgtttggcattgtcacggatagccgcagcatcggcgctgcttaccccgtacatcgcaaaagccggcaaataggtcatacccgtaaaattagccattgcctgaaacggccttaagagctcgctcagtgaaaaatggttagacccgcctgcctgatatgcatcctctccggcacctacggaaacagccagcagcaattctttgccgtgcagcgcctttcctttggagccgtaagcccatccatacgccagcacatgatccatccatgtttttaaaagcggaggcgcactgtaccagtacagcgggaattgaaatacgatccggtcatactgttcacacagctgccgttccttttccgcatctatttttccgtccggatattctttataaagctcacggaccgtgatatcatcatgattttttaattcttctgtccacgccttattgaccgctgagttgtccatgtcaggatgaaccgctaataccaatactttcacagctaccacacctttcccttttgactgtattttacctaatctttgccggttcagccaaataaaaagaaagcccccgagaaaaatggggctttcttttttaatttattccgggcttccttcggttgtttcgatgtccttcgcaaaattcggattatctaaatttgcgttgaaaaagtccgccgtattcggaagcttgaggttcatattcattttttgagaaatggtcactttacaatctttaatgacatagtcaaacacgtgtccgccggaattgcgtccttcatcaatgaagtgcaggtgatatccggaaacagcgatgccgtttgcgtatcccggcgtccagaagccggcgattgtaccttgaatgtcgtcaaagttgaacacaggctgtgttttcaccgcttcgatcatcggaacgtacggtttctcctggcgttctaccgttcttgtctgcacctttttaaatacgccgtctaaacggatcgcataaaataagtttttactaggcagaaggctggcgatttcctgctcgaattcttcacgggtcatttcgccgtcgatcgtatgcgtcatatccggcgtgaaaaatgtgaatgagcagaatggtgacaggtctccgcctttaacaggcgtagccgttccgtcgccgcgcagacggtaaaattctccgtcaaatccgattaattcgccgtccaatttgttgaacgtgccgattccgaaatcaccgaacttcggaatgtcagccatatcaaaatctccgtcatatactccgtccagcagagatgtcattgtggatacttgatagatctgatcctcaggtgagcctttttctccgcggctcatcatatggatgtcgcttgcgtttttcatattcccttcactccttttaaattgggctgttttagaaaacaggtcatggtgcgcagagtgctagagagcttttgctttcattttttctttgaattgcttcggaagcatgtcgcttgataaatgaacattgtcactgtaatcgacaggaatgtcaatgatgacagggccttctgtgttcaagcctttttgcagcacgtctgccagctgttccggtgactcaacgcgcaagccggtggcgccgaagctttctgcatattttacgatgtcaatgtttccgaaatctacgcatgatgtacggttatattttttcatttgctggaatgcgaccatatcatatgtgctgtcattccatacaaggtgaacgatcggcgcttttaagcggactgccgtttccaattccattgcagagaacaggaatcctccgtctcctgaaacggatacgactttttcacccggattcaccagtgtggcggcaatcgcccaaggaagcgctacgcccaatgtctgcatgccgttgctgatcaacagtttcagcggctcataagcgcggaagtagcgggacatccagatcgcgtgagaaccgatatcgcaagtgacggttacgtcgtcatcaattgcattgcgcagttcttggacgatttgcagaggatgcactctgtcggatttatggtcgcttggcgccttctcgctgtctgtgagcatctgttttaattcgctcagcacttcttgttcacggctgcccatatcaaatgtcacagcgtcgtgttcaatttgtttaaccgtagcggcgatatcgcctaataattctaattccggctgataggcatgatcgatatcggcatggatttcgtcaagatggataatagcacggtcgccgtttacgttccagaacttcggatcgtattcaatcggatcataaccgatcgttaatacgacatccgcctgttcaagcagaagatcgcccggctggttgcggaacagtccgatccggccgaaatattggtcttccagctctctggacaatgtgccggccccttggtacgtttctacgaaaggcagttttgttttggcaagcagtctgcggatttgttttaccgcttccggtcttccgcctttcatgccgactaacagaacgggaagtttcgccgtctggattttcgcaatagccgcgctgaccgcttcttccggtgcagggccttgtttcggcgccggcacgctgcgtacgtttttcacatttgtgatttcattcacaacatcctgcggaaagctcacaaaagccgcgcctgcctgacctgctgacgctgccctgaaggcgtttgttaccgcttctggtatattccctgtttcctgtacttctacactgtattttgtaatcggctgaaatagcgccgcattgtccaatgattggtgtgtccgttttaaccggtctgcgcgaattacgttacccgccagcgccactaccggatcaccttctgtattagccgttaacaagccggtcgccaagttggatgcccccgggcctgaagtaacgagacaaacgcctggttttccagtcagtcttccgacagccgcagccataaatgcagcgttctgttcgtgacggcataaaaccagttcaggtcctttatcttttaacgcatcaaatactgcatcaatttttgcacccggaatgccaaaaacatgtgtgacaccttgctccactaagcaatcaacaacaagctccgccccccgatttttttcagaggtttttagttcatttgttgcttttgccaacaccctcactccttattatgcatattaaatataaaattttaagtaatttgtgatattattcactatacactctttggaaattgacctccaatatcaattcgccgtatgattaatatgtttcacgaataattaacaaagagaaaggaatggataaggatggagcttcgccatcttcaatactttattgccgttgccgaagaacttcatttcggcaaagctgcgcttcggttaaatatgacacagccgcctctcagccagcagatcaaacagcttgagaaggaagtcggcgtgaccttattaaagcgcacgaaacgggttgtagagctttcagctgccggagaaagttttttaaaacacagcagaaacgcgatcgaagaaatagacaaagcgattgaaatggcgcagagaacggcgcggggagagctcggccgccttgtcgtcggttttgtcggctcggccacatatgaatttctgccgccgatcattcgggaattccgcgaaaaattcccctccgtcaagcttgatctgcgtgaaatttcttctttcagacagcaggaagaacttctgaaggggaacattgatatcggcatccttcatccgcctttacagcattccgcgttacatatggaaaaggtgcagagcagtccgtgcattctggctttgccgaagcagcacccgcttaccgctaaacagacaatcgacattcaggatttaaaaaatgaaccgattatcacactgtcgaaagaaacatggccgactttatacctggagtttgtaaactactgcgagcaggcgggcttcaaaccgaaaatcgttcaggaagcgacggagtatcaaatggtgatcggattggttagtgccggcatcggtatgaccttcgtgccttcttctgctaaaaagctgtttaatctcgaagtcgcctatcgcggcattaatcaggtgcagctcacggccgaatgggtcattgcctaccgcaaggataatcaaaatccgattctgaaacattttctggatattatgaataaacgccaggctttattgcaggcggataaggaaaatgcataaaaagagggccgccgaaagcagcctcttttttttgtgcttttatggatttttactaaattggtagaaacgctcagtacaccttacgacctgtacccgtatacatacagtacaactgatcaggagggataaaaataacggggcggcaatgacccatctaaaaggaggcagaacacattacacatattaccgtcattttgaccctgatttctttctttgtgaccattatttttatattttggagacccgggggattaaatgaagccgttccggcgtcgctgggcgccattctcgttttgttatgcggaaccgtttcctttcatgatttgggggatatagggtcaaaagtcaccggagcctcaatcaccattatctccacaatgattatggcgatcgcgctggaaagcttcggtttttttaactgggcggcggccaaactgcttcaccgcgccaagggatcgggcatccggcttttttggctgaccaacctgctctgtttttcaatgacgctctttctgaataatgacggcagcgtcttaatcaccactcctattttactattggtcttacaatatctcggacttaaaagacatcagaaaacaccgtatttaataagcggcgtattaattgcgacggcggcaagcaccccgatcggcgtcagtaatatcgtcaatttaatttctctcaaaatgataggcatggacctttatttgtacaccaatatgatgtttatccccggcacgctgggactggtgtttatggcctttctgctgtttgccgttttttaccgccgtttgccgaaacagctccccgatattccggttcattttgattcgctggaacacaaacgatatcatccgcttcagcctccgccagacccgacccaaaacagccgtacgaacatcatgttttgtgttttggcatttgtattgttcgtccggatcagtctgtttgcagcttcttacaacggcatatccgtttcgctcgtggctgtcatcagttcagtcatcctgcttggctggagatggttttatttaaaaatcggaccggcagatttattaaggaaagcgccttggcatatctttatttttgccttcacgatgtacattatcatctacggactgcataatatcggactgacggcgctgcttgttcagtctattgagccttatgtctcacaaagcattgcccacgctgcatctattatgggcattgctacatccgtcctctctaatttgttcaataaccatcccgccttaatgatcagcactttaacattaactgaaatgtccatcgacccattaaccgtaaaaatcatttatctggctaatattatcggcagtgatatcggatcattgcttctgccgatcgggacattagccacgctgatctggatgcatatcatcagacagcacggcgaaaaagtttcttggtcagaatatatcaaaaccaccattatcgttgtccctctcactgtcgtgtttaccattaccgttttatatgtttggatcagttggatttacctttagctcccatgaaaaaaaactgcctgctgtataagagaggcagttttatcatttatggcaggtgcatggtttttaaatgattcaatttccaaaaaacagtatcgccgtctgcattggtcagttcaagaatattatctgagacatcctgcaacagccccactttattcggtatatctcctaaatccagaataatcagcttcccgatatatctttttaattgctcctcaaaattccggacaaggggcacattagcgggaacaaccggcagctctgaactgtttaatgtatacggcgtctgctcatcggaatagggtgtcagccatttcaaatgatgcatcgagatgaaaagagtcttataaaccggagagaagaaaacaaaataatcatttaaaacacttgtcacatacccatgaatggaacggtctcccgtaacaaatatttctgtaaatctgccttttatatgctggagggtattccggtaagaaaaggaatgttcctgtttttcgggatgcggacttttttttctagcgtacggttctttattctcttcgtccgggagcgtcaatgtcatccgctgaagatgcagaagcggaatataaagaaacgtccggccgtcatgaatcacaatgatatcctgaccgatatccaaaagagttcctgaaaatgtcgtattccccgatatctcaatatcgacttgtttatccagaaatctgcttaatccagccatttcattcccccctctcccgcgtttacggacaatctttccaatcatttacggccgcgtttccaccgataatctattgtccttaatacagtggcgtagctataagagacctctttctcccgttttgaggatcgaacggatcttgatgatcttttcgactttttagaggaagtacgctgctcttcgcgtgattcttcctcatgcggcttttcttcttcggcgctctctttctcacctttattctcgtcgtctttattctcctcttttttagctgctccttttgccccttcgctgatgctcttgatatgaaaaggatagatccgcagcacttctttatctttcacaagagtgtagtggccgtcggaattatccacaagtataccttcaacggcttcaggacctccgcggttgatggatacccatttgtggatcaggcgtttaaatatgccgtgaaaatcatcagccatttcaaattccgggcgctcctcctcttggccgtcctcttcttgttccgcgctgatgcttttgacatggtcggcgttaaaatatacaattccgtcatcttctgtttccagcacgagaaaatcatcccctgtttcgtgaagctttcctcttttcgattccggacctccctgattcaattgcaccgtgcgattggtcatccggctgatcaggtcttgaaaatcatcagctttttcacattctgccgcttcggactgcgatacggtttcactcgtattttccgtcacacttttcacgtgtttccattgataataaacgattttattatcaacctgaagagcgatataatccgattgaatgtctgctaatctccctgtcttggactccgggcctccccggtagacagtaattacctttccttccattgcatgcaaaaagttgtcatcagaccgatgccgcttcgtattgcgtttcatctattgtcctcctagtcatttttctcataatgtaaaaagcataatgcatatatacgtatcacgattattttcgggaactgattcaccagcctatttgtaaaaaatctttcttcatttccaaatcagatattccaccgctctaactcactgctgatgaaggctgaccgctccttaatgtattcgcaaatcacttcaggctcccggtcaaagcaatcaatctcttctttcttatatggatccttcgcgacatgcggcctgatctgctcatacagtgacatgaccttcggcttcatatattcaatggtaaaccgggtctgaagcgtctcttccaaaagccgtttgtacgctttgcggaaatacggttcatccagaagccttgcagtcaaggtattaaacccttgtattctgacataatcggcctccatccgatcaccgtgaatgtctcttccccacgtcgcatcgtaatcccacggaatgacttcaaaaagtcccgtttcatgattccggtacaaagcgtaattatgaacaaatccatcgtagtttgaggtaaacacgatgcccgcaagccacctcaaatacttatcggcgtccaagtgtttgacgatctcccccttgaactctgacttcggcacggtattaattttatagatcatatcctgcaagtataaatcgtcttctttcgttcccgttttcttttcataaccaagttcgagcgatgttttcgtatcccgctccagatcactgacgagggagaaattggcgtcgtcatcaaccgcgtaaaaaacagcgccgtccgccaaattccgtttcgccagaaaatattcatccactgactccagctcaagatacaccccctcatgtctgccattgatttgcagggttacgaaattcgcctttggtgacagcgtcccaagctccgcgaagaaatcgagagacagcttattccgcatcatcgacggatctttgtattcagcgtttaaatgtatctctttcgccctgcgaaatgttttcggcgaataaaaagcgatgtgatacgattttttcttaaaatctcttatatgcgagccgcggtacgccagatcaatgtcaagccgtttttgattcactctcagcaccgcgggcaccggatcatcatcccaaatgtcttttttcagatccattaagtctttcgggtgaataaacagctggtatagaggcaatgttgattggtctttcatcagtaaacctccctgtattaatttaggctgtgctttttatataaaactcagcgaatcacacatacacttttttcattcatgcgtactatgtggtagtaaggatcgcatccttaaaacatatatcatgaggaggtttcaaaatgggccactattcccattctgatatcgaagaagcagtaaaatccgcaagcaccgagggattggaagattatttgtaccaagaaccaaaaagcagtaagaagagaaaatctcgcagccataaaaaatcccgttctcacaaaaaatctcgcagtcataaaaagtctcgttctcataaaaaatctcgcagccataaaaaatcgtgccgctctcacaaaaaatctcgcagccataaaaaatcgtgccgctctcacaaaagatctcgcagccataaaaaatcccggtctcacaaaaaatctcgcagccataaaaaatcatgccggtctcacaaaaaatctcgcagccataaaaagtcccgttctcacaaaaaatctcgcagccataaaaaatcatgccggtctcacaaaaaatctcgcagccgtaaaaaatcatgccggtctcacaaaaaatctcgcagtcacaaaaagtcatgccgccgcaagaaaaaacgcacgcagaaaaaaacttatcgccctcataaaaaagacccttgcaaaaaagacgattactgcagcaaaacagagtactggaaagacgggaacatctgggttgtaaagaaaaactacaagtaacaccattcgtaaataggctgccggctaaacggaagccttttttcctcaatcagatatatgccacgtgataagatatgcagccggttttcttttgttgtgtttccgaattttctttctgtataatcaggtcatacgataaagaaaggcggccgaaatcatgcatatcttacgagcagacgaactgaacgcaaaagacacttacaaattgctttcgggcacagtcattccccggccgatcgcatttgtcacgacgcggtcatccatcaacggcgccgtaaacgcggcgcccttcagtttctataacgttgtctccgcagaaccgccgcttctggccatctcagtcagccgcgcggacggtcggcagaaagacaccgcgagaaacgcactcgctcatcgggaattcgtggtgcacgtcagtgatgagtccattattgaagacattaacaaaacggcggcaaggcttgatcctgatgtcagtgaacttggcatgacagacctttctgtgacagacagcgcttgcatcagcgttcccggtataaaagaagcaaaagtcaggtttgaatgtatactcgaacgccatcttccgttccaaaatgacagcggagaaacgacgacagacctcatcatcggcagagtcgtttgttttcatttgaatgaccaagtatatgacgccgataaaggctacatacggacagatgagctgaagcctgcggcaaggctcgcggggaatgaatacgccagactcgggaagacatatacgcttgtccgcccgacctgaagcaggaaccattataatagaagaaactagtcaaaaagacccctttcgaaaggggtctttttgagtcttttaccatgtaactcagcctaatgtcttatagaatgccgaaacttacaaggccctcacccgtatgaaacgagtgacacatttttaggaggcagacgatggatttcactcagttactgattttttcagccgtatttattttgctcagccttatgtttcaagtatttgccgtcaaagttctcaatttgccaaagcctgttaaaaagcagaagccgataaacggcacacatcgattaatcgaaatcacactgcttattacgggcatcgcagcggtgaattttttcaatgaaatgtacgtatttgcgggagttgttttcatgctattttgctgcagcggcttaatggaatggcggcaccggcgggaggaaaagcaatatgtgtacgattcgttttacgcaggtctttctgccgcgcttggcgtgcttatttttttcatcagttagcgcagctctatactcctgcggccgctccgtcgccgcgcgggtcggccccgccttggagaaagccttcttcatcaatgacgatcgctgccgcatggcccataagcccgtcaaaatcaccaacggtctcgacgcggtggccgctctgccttagggcttctctcgtttcagggctgattctgctttcaaccctcagcccttcatactcctctccccatgtccgtccccagacccagcgcggctcattgatcgcctgctgggggtccattttgtaatcaatgatgcgcgtaatcatcgctgtctgagtttgcggctggccttctcctccctgggttccgtacaggatgtgcggccttccttctttacaggccatcgccggcatgagggtgtggaacgtccgcttgccgggttcaagtgtattgatatgggattcgtccagcgaaaaaaatgacccgcggttttgcagcagaatgcccgtctcccccgctgtaacggcagatccgaactcaaaatagaggctctgaataaaggaaacggcatttccttccgcatcggcgacggcggcataagcagtgtcgcttccgaccggccggcttaccgccggcgcagccacgttaccgatttcttccgcaagctgctttgcataccgtttatcaagcagccgatccagcggaatatgagaaaatgccggatcagtcagcacttcattccggtgctgaaaactcttcttcagcgcctcgatcagcagatgataatagtcaaaggaaccgtgttcgatctgagaaaaatcatagttttccaatatattgagcgtcattaagcctgtaaagccctgtgaattcggcggagcctgatagattttgcacccgcggtaatcggaggataccgggttcgtccactcgccgcggtgggctttaaagtcatcaagtgtcagacggctgccgttgttttgcagaaaggatgtgatgcgttgagcgaggtctccttcataaaaagcgcttcttcctttctcggcaagctgctccaagctggccgccagatccttttggacaaaccgttcaccgggcatgggcgcttttttgtttctcgtaaaaatggccgaggtgtaaggcatcgaggctaaaagagcgagattgcgttctgtgtgggcgcattggtcggcggacaccggaaatccgtttgccgcataatcaagagctggcttcagcacctcagcgagcgaaagacgcccgtacgccgaaagcacggcatcccagctgtccgccattcccggaacggtaatggcgctttctgtcccgcgcagagggatcgcttctctgccccgatacaagtctctcgtcacatgcttccctgaacggccgctcccgttataagctttgattcgtcccgtttctttatggtaagtgagccaaaatgaatccccgccaagacccgtcatatgcggatacacgactgccagacatgcgctgaccgccactgccgcgtcaaacgcgtttccgcccttttccagaatgccggcccccgcctgagaagcgagataatgcggactgacgaccatttgtttcgttccgatggttgaagtattcatggcaagcccctttacaaattttctcaattataaaaagcggcttcgcggccatccacattcctgaaagaaaatctcacacactatttacttttcgataagaaataattctaagtcattacgtatcgaaaacaataaaaaatttctcccttcataccgtaatgtttcatgatacaataaagtctaccaaatgaaggaaggtgaagcgggttggaacatgaatacagcattccgaatcttgtccttgatgaaacggataaacagattctttcgattttgcacgaggaagggaggatttcctatacagacgtaggaaagcgggttaacctgtcgcgagtggcggttcagcaccgcattcagcatttactggatgccggtgtgattgaaaaattcaccgctgtcatcaacccggcgaaaatcggccgccatgtgtccgtgttttttaatgtggaggtggagccgcagtatttggaggaaaccgcattaaagcttgaaaaggagccggccgtgacaagcctttatcatatgaccggaccgagcaagctgcatatgcacggcattttcgcaaatgatcaggagatggaagagtttttgacaaaacggctctatacgcaaaaaggcgtcgtcagcgtcgactgccaaatgctgattaaacggtataaaagcagaacgggcatgaagctgtaaggaggacatagccatgaaacatccctattgggacattacggcggcgatggtccgaacgggcattttcggattcgggggcggcccgtcggtgatcccgctcatccgccatgaagccgtcaataaatacaaatggatagatgatgatgaattcggagaaatattagcgatcgctaatgcgcttcccggaccgattgccacaaaaatggccgcgtatctgggctttaagctgaaaggcacgttaggcgcaatcgtggcaaccctcgcccacattctgcctacatgtcttgctatggtaggcttgtttgcggctgtcaatgtcttaagccactcagcaattgttgccggcatgattggcgccgtcacgccggtaatcgccgtcatgctcggcattatggcgtacgagtttggccaaaaagcgcttaaaggtttcggctgggtcacgggcatcctattttttatcatcgcttttatcggcctgcaaacgctgcagatcaatcccggctttgtcattatcattttcttagcgtacggcgcgtttcattttaaattgaaagataaaatcacaaataaacgttcaaaagataaaggaatgtcggcctcatgatcatgatttatgtatttatggcgttttttgtcgcaaacgtgctcgggtatggcggcggaccggcgtcgatcccgctgatgtttgaagaagtcgtcaacagatacagctggctctcaaacgatcaattctcaaatatgctcgcgcttgcgaacgcattgccgggcccgatcgcaaccaaaatcgcggcgtatgtcggctacagcgcaggcgggtggcccgggttcctgattgcgctgatcgccaccgtcgtaccgtcggcgctcgcattgatcgtcctcttgcgcatcattcagcgcttccgccaatcccccgtcatcaaaggcatgacgctgtccgtccagcctgtcatcgccgtcatgatgctcattcttacctggcaaatcggcgcagacggcatcaaagcgatcggctgggttcaagcgatagtgattgctgggatttccctccttgccttgacaaaatttaagatgcatccggccttcctgattatcgcggcgtttttgtatggaggtcttgtggttcctcatttataaagaaaagcacctggacaggtgctttttgtttcagtcccgatatgttgttcgatatagataactgtttcttcgtctatgcttcttacatgtggttcctgtcatcctcccagatggcctgatcaataaaaaacatttgcagcctgccggactgcaagtgttacacgtgatttttccgataaaacgttcgcaaaacatgcgtttcaaggtcagccagacggacagggatcggcagcctgctttctcgattgatcattttcattgtgacctgatagctgctttctaaatcaatgttatgtccgcaagacaagaagataggcttcacgtcccgccgtgtccgcagcgcccggccatatacctcgccgtcaatgagaatatcggtgtaggcgccgacttcattttcgggcatctcaaaatcgcagcctttgattttgagataggttttcgctatcccaatcgtcggcttacccagaaaaaaagccgcatgggtggcaacgcccatatgattgtaatgcagatacccgttgccatcaaacaaaaacacatccggctccgcctccagcttttcggccgcttcgatgatcagcggcagctcgcgaaacgcaagaaaaccggaaacatacggcacgctgattttccccatgctgtgcactttttcaatcacttcttttgtatcagcgtcaatcacgatgatactgcatacgccgtacggttccccgtcctgctcccaataagcgaggtcgacgcctgcgcatgtgttgacggagtctggatggatgacgggggataggttgattctatgtattagggattgttgtgtttgaataaaatccgattcatcatttagatcaaaatcgtgaatttgatgtattttcatttcattggttttcctcattttcatttctaaaatcgtcttttcagttcaagttcttcatttcgatatacaacgcaataaaacttccataaggataatctccatcccagccacatggaaaatagcccgctttataaattttgaaaagtttttcaaaaaaattgtctgttttcccgtttactgctctatttattgcacaattattcagatctgctacgatctcttcaagaaaagtattaaattcagtcgtagcacttctgacattttccgaaaaaattttcagaagcatgtctaggttttgtggtttttgatcatcgtttaattcataaaattttccccatacctcactcatctcgttttcttttatatctttccacgcatattcatcttcaccaattacatcttcgtaagcatagtacttagctttttcttcatcattaataattttagtaaaataagagatatcatgtgatgcaactgctttaaaggttctggaaaaatcaataacttcttttacctgattatgataatgtccgtatttcattactttatacacctttcctaagtacaaccgtagggttaccaactctccggtaaccggaacgcagcctaaagccaaataatttattcagaatttacaaaacagaaaacaacaattcacctatgaaaaaaccttgaaaggcttcagcagccatcaagtttaattaatttttctaaccattccctcttataagtctaatcctcaattaaatcaagataatatttatcatttttcataagttctattaaaaactcttctaatgaatctgcaatttttatatcaccgtaatatattgaattgttttgttcattgcctaatgcaattaacgataaagcactttcatttgcttcaaaaaaaatcaatttatcttcttcaagttcctcataaacttctatatctggataaaactcaaagtcattaacttttaatcttgcatctctaattgaagcaggtccaagaatgcgattaatattatattctgattttttcagaaagccgtatccaacctcaagaagaaactgtctcaaatcataaggtaaccttaaacctaacttattttctacttctaagatttcattctcacttacttgataaaatgtattttctttgtaagttttaataaaatcatatttcacaattatttacctcctttgagtgatagagtttttctcctgtgacggggtcatagcccaacagacatttaagtcattttaaacagaaaataacaattcatttgtaaaaaaacttgaaaggcttcactagccaatcaaggtcaattaattcttctaactatcccatttttaagtctaatcctcaattaaatcaatataatattcgttatcattgaggaactttttaaaaaaatcctctaacgactcagctatttgagtgtcaaaataaaatattggattgttttctaattgtaaatctatagaaatataaacaccctcgtttacttcaaaaaaaataagtttattttcatcatcataaagttcatctaaatctgggtcaaactcaaaaattccttctcttagtctaatgtcggctactgcccctggccccaatatcctattaattgcattatcactttcacctttgataaagccataaccgacttctaaatataattgttttaaatcattaggaatatctactttcattctttgttcagcttttaatatatcctcttcagggaccttatatgttttattttctaaatgatttataaattcaaattcagccatgaactatttttacctccttggaaagcaaacattcatttttcgttcagctattcctgttacatacaaagaagcacttgatgccttaagtgcaaatcaagtgcttgtcttaacaccaatcctattcaattggccctataaattcagtaataataagaatatgttctcttaattttaccttttctagattctctactttttcagatccacctaaacctagtaaaggagtgtatccgaaacattcgtcataatcaggtttaccgtatattctactagcttcgggataaggttcccacattaattcatcattcataaaatcattatcttttaaatcatcaaaaaagaaatcaaatccagatgaaacaacatgaacatgcccttttctaaaatttaataaattaacgtatttatctttttcccatactataatatcacccattgaggtggtgaaaataggaatcgcttgctcgtacctcatataacatctttctaagatatctaaatactcgtctgggttaataacttttaaaaaaccgtttaataatgttcccaaaccatatttatcccatacttctatcagttctgcaggaagtttgtctttatatcttaaagtaattctttcatcaactgtatcgtatttaatatagttctcaaaggtatccaattaaaatgcccccttttgatattgggtcaactttacattcaaataagtattctttatttctgcaggtgacatattctctgccgttttcctaatttgctcatcaacaatatcaattctatatttccattgtgatcctaaggaggaattaactcttttatcccctaaaccaccaatactgtctgcccttctccagctatttgatctggattgtgaagcgctgcttgtgtgtccatccaatctgaagcttgtttagtcgcatcagctcttgagagtccttgctttcgcagttcagcaattttatctttaagcgcttcttgtctagccattttttgagcagaatttccttctatcgctctacctttagcaatatatctttctctatttttcaaatattcgttaactgttaattcgttcattcctttttcttgattttttagttgtcttgcaaattcttcaggatcatgttttatatttctcttaaagttcacttcaatttcacttattctaggtacatcatctaaatgccttacattacccgtacccttggtgcctttaccactacccgccatcttcacaatcccaagatctttcacagcagtcgttttcacatcagcatgaatgattgggaaagttgcgccatccgctgtgacagtcttgtggacacgaatttttacattcgtcggtactttgaattcttttacttggtctagaatcttttttcctttttcaactattgatgcttgtggcgattttgcaagcggtatgcctttgtttcaggtttaaaagctcctgcgtttatttctcctacaccaccaaggtgtccgaattcactatttatttttgttggcacaagttgcattgttttaacatcatttaattcatgccatgttaatttatttttttctcgatatttttttatatctcttgcactaattttaccagattccatcccaaattgacttgctaactcaggtgagccattaatttggtcagctaatttttgatctgattgaacaaaattagctgtcttgctttccccccataagttccttttcctccaagcatatagttgatttcaacttgtgcctttgcaattggtgaaaaatcaggaactccatttttatattgaatcccttttacaccagcctcatctgatatgcttttcaattagggtctggtggaggtttaagcgtacttaaagattctcccctaattccttaaaattcaatctttggattgatctgtgcaggtgtttgattaatccttgattcatacgatagggtatacattttgaagttatttgtacgcactctataatttggtaaaacatcatataaggcttataaggatcacctctactctctaaatagaaaacagtttattcggcactcacccccactaaaaaagccttaaaagaaaataaaaatcttttaaggcttttcattactagaggttattgattttgtctttataaacttttaaaattgttgtgtttaaatcactgatttctgagaaatgccattcaaacgtcgttagaattctatgaagttcaaataacattttctctatttcatcaccatcgttcttatccaatgaaccaaaattgtttagtataatatctaaatctctagttaacaccctaaaatcctcaaggttctcgtactgttcatctaaatcttctttatttacaatattaatacttgaattaagtttatctagtatgtccaatattccttctaactttttatccatataaattcctccactaattatttccaccccttaactactcgtccaagtgctttcttagtcttgtcagggtttaaagtaccatctaaattcaatacgtatttcacatttcccgtcttatctattacttctaaatggtctttgtgtaatgcgtcaagataaactccataaccctttttcagatattggttatcagttttcttttccaccttataaattgattgtccatcgtactttacttttgattttgataaggaattacttattttttttccaaattccatatcaaaaaactcattcatatttgaaacaggtttaacaatacccttaatacctttaccactaccagccatcttcacaaccccaagatctttcacagcagtcgttttcacatcagcatgaatgattgggaaagttgcgccatccgctgtgacagtcttgtggacacgaatttttacattcgtcggtactttgaattcttttacttggtctagaatctttttccctttttcaacttttgatgcttgtggcgattttgcaagcggtatgcctttgtttacatgcttcgccaatgcaccggctccaaccaaactcagcgcagcttccagcgccccttgcttccgcttctcctcagacactttgtttccgaacatatcacggcctgtgacggcttctgtgaatccgtttgaggcgacaaggccgtatgcgcccatttctgtcattttgagaatgtctaaggattttccggttttataggcatctaaagcatgttctgcggcaatgacggtttttccggttttgtaaatggcttttccgcctttgaaagcgcggcccgcccagccgacgaccggtatgaatccggcggcggccatcgctcctgctgtgacgcgttctgcggtggagagtttttctccggtcaccggatcaacgccttcggctgctcttttataatcataatagccggtgacttcgccggtaaagttgcagatgccgtcccatgttttttcgtaccatggtctattggcttcttcttcagccttttcctgaagccgccttgcttcggcctgctgggcttttgcgtcaatatagtccgttccctgtttttctgtcgccatgacgcttttgtagatttcattgctgtggaaggcttttttgtcatagtacataggggatgcgcttttcccgttgctggtggcttgcatgagaacagaatatttgctgagcactgcgttgtccagagattctaagttttgatattcagcggtcagggattcatcaagcgtatcgactgccgtgatcgtgtcacgtctggttttctgggcatcgcccattttgtcagcgtaatcatccagcgtatatgtgtcgagatgaataatatcgctgatgcctgacaaaattgaatcgatttctgctttatgagcggagacaatctctgaagctttcaaatccgcgttgggcagctcatgctccaaaaatgaagtctccacatatgtatcgctgagttcttgatctttaatgtcacctgaaatgccatttaaaaacgcaatttgagcagagacaagcgtcagccagctgtcggcgatttccgcttgtccctgaaaaaaatcttttatattgtctgcgcctttccctttcaaagcatcacccagatcggccacgccttgaaaggcttgtttgagcgcacgcagctgctcttcaagggcttcgtattgtttctttctcttatctgcttcgtccgttaacgattgtgattcaaacactttgctcatcggcaagtcctttctttcgttattttacggcgatcgcctcgtcctgttctttcaaagaatctacgttgtctttaacgtccgcgatattcttatgaacggcctgcttgtattcgctgatcatcgatacaagctttgcctcgcgggattggtacttggaggtatagtcgagcttgttttttccgtttgaaccggcgttcccgatcgaaacggcctccaaagcgctgctgacggattcaagctgcttcatgacggttccgtatttgagttttatttctgccattaaaaccaactccagcttcttttgattgattgtattttttctccgaccgtgtcaagggcttcttctcccagcgtcagcaggtgctctgcctctctcgcaatacttctggcggcaaggagccctcctttttcaatttcaagctgtgtcatctttaagccgattcggtaaatataaccgtcgtatttgtctgtgacgattctgtatgcttctgtatgggcctgatcgcgccggtcatcaaattcttcagcaaaagtgccggtccaatgatggtccaggtgcggcctgaggatgtccctgatttcagatacgccctcttcctgcagagattctatctctcttttcgcttcttttaatttatcaatttggtgttcaacctcgcccagtttatggctgatcgtgctgttaatatggcttaatgtgcttgaatggctcatctgttttcacctcgtcttacgcaaaaagtcgtacaaaaagcacagacttttccatactatatttccatatattatattttaaaatagacagaaagcagcttaaataggttaaatggcttattttcaacagccgagatgctcatcattaacgccaaaagactcacacaaacggcatatccattcatcgatctcctctatgtatccatgataaattccctaaaaaaaaaggagacagtgattaaccgtctcctttgccttgtatcatgatcatcatactgtcgttaactgcagtcccagttgtacaaaacgtttgagaaatcttttctcttcaaatcttccggtctgataaagaaattggcgattcccacatctccccacatcgaatcaatgtcatcatctgaatcaatttgcaaaagcagaatcgtatggttttgatgagaataagaccgcggatcttcctgggtgaaggaggcatagccgccgattttatggccgaatgcgttcgccgtatattcgtcatacacctcatcgtcaaactgctcgaaatagtcaaaggcatccatcccggcatactgcctgaattgaaaatcagacgggagcacccattcagcagacagctcaggggtgatcagcgcttcggattgaatcggaaaatcgtactcctcttcaacctgaacgaaagaaaaatcatccatgagctccgcttcttctgctgtcacatgttcaaaatatttgacgcagaaacccgtttgcacgcacccgtcgtcaaaattcagaccgtatacgtcatcactgaccgatatgtaaaactgaagaatgccggtgtccggaaaatcagggagtccgggcatgtccgcaaaattgatttgagcgagaagcttcatcggcctgccgctttcatctttaggatatggttcatgtttcggaaaataggggtctcctgcaattttactgtcataccgtcccgtttcagcttttttgacgtgcagtttgataaaaggccgtgctgacgtttccagcagaccgcgggatgattccattcgcttcggcaatttccatgttttttccacgataaatatctccttcgtctctaatgattgtatgataaaaggccggcgcggtccgccggcctttcaagtgacagaatcagtctgaggcacgacggctcttcttccgattgagatatattccacgcccgcctgttccgcttcctcaagcgagtggcagtttctcccgtcgaaaataaccggggtttccatcagctctttgtacgcttcaagcgggaagtgtttaatttgttcccaatctgtcagaatcaggacggcatccgctcccctgacggcttcttctatggactcccgataggaaacttcagccggaagcagcccggaagcccggaatgaagcgatcggatcgtacgctgtcatccgggcgtcaagagccgccagacgatccgcaatgacaatggacggcgcgtcccgcatatcatctgtattcggcttaaaagacagccctaataacgcgatggtcttccccgtcacaccgccgagcctgttcagcactttatcaaccagcatggactgctggttattgttgactttaatgacggacttcagcaattcaaaatcatgctccacatgtcccgcaatctgcacgagggcgtttgtatccttcggaaaacaggaaccgccgtaaccgatgccggctcttaagaattgattgccgatccgtttatccaatcccattccgtgtgcgactgattccacatccgcaccgactttttcacatatatgagaaatttcattaataaaactgattttcgccgctaaaaatgcgtttgacgcatatttgatcatctcagcgcttctgatgtccgtatgatataccggaatcgcaaacggcgcgaaaacccggtcaagcgtttcccgcgtctgccggtcttcagccccgatcacgatgcggtctccgtgaaaggtatcgtgaattgccgaaccttcacggagaaattccgggttcgaggcgattgaaatgttcacgtccgctttcagccgtgaatgaataacttcgctgatcctgtcattcgttcccacgggaaccgtgctttttgtcacgacgatcgcatctttacaaatatgttcggcaatccgttcggcgacattttcaatataagcaaggtttgcgtgcccgtcttctttttgcggtgttccgaccgctataaaaataacgtccgcttccgcaagccctttttcgtagctcgtttcaaatgccagccgatgccggccgatatttcgtttcatcatatcttcaagtcccggttcaaagataggggacaagccctttctcatctgctcaaccttacgttcgtcaatatctatgcatgttacgtcatggccgatttctgaaagagacactcctgtcacaagaccgacgtagcctgttccgatcactgttattttcatcgtgttcccccaaccgtttagaaattgctgctgggcagcttaccgttattatcatatgattccggcgccggctgaatgccggaagcctgaggtcatgataggaaaaaacgtcgccggccgctgataataagcataagcataaaagaatcatcttgcaaaacagccgcttacgcttcatttaaacgggatggagacgacgattaaaaaagaccccagcgcttacggcgggccacaggcagcggaggttccttataaacggctttgttttcagcgagaagcgccgcgttttccgtgagcatgtaaatcagctcagcccctgcttcttttttcagaacgccgagcgcctcctgataataaaaatttctcggtccgagattatgggcgtcggatgcgagaaagtggatcaaattcgcttccatcagctgcagcgaaaaggatttcgctttccgcccgaatgctccggcaatgcagccggccgtcacttgggcggccgcgcctttcttcacaagactgtatagaacggaagggttttcgcgaatttccctgttccgctccggatgggcgatgacggggacatatccgttcagctgcagttcataaaacagcctttcagcgtaggccgggacatgatccgccggaaattccgccagcacatacttcgtatcatggagcgggacaagcgagccgctttgaagacctgtcagcagatctccgtctgttctgatttcctggccgggcagaacagtcagcggaatgccttccttattcaaacgtttgtttaacatgctgaccgcttcgttgaccgtatgtcggtccgtgtcatagcggtatttcacatgatgcggtgtcgcgatgatcgtatcaatcccctgtctgaccgcttctctcgccatcttcaggctttctgtatcatccgccgcgccgtcgtctatggaaggaaggatgtgacaatggatatctatcatatttcaatccctccttaaaaagaatggaccgcgcccattatgacattattgtccgtaataggcgtagtccgagtgtttcgtttgtttcttcccgttcatcacggccccaaggagcttgcacgggcagtaatcgagcgcttctttcgccttggccgctttttccttgtccgttttcccgcttgagatcaccataatggccccgtcagtgtagctgcctaatattttcgtatcggctacggccaaaacgggaggcgtatccaaaatcaccttatcataaactgcgccggcttctgacagaagatctttcatggcgcccgtcgataaaagctccgccggattgggcgggatcggcccgctcgttaaaatatccaggtttgcttcatcagccggcaggacggctttctgaaacggcatctgttttaacagcagtgacgttaatccggttccgttgtccaatttgaaggtgaaatgaaccgtcggtttgcgcagatccgcatcaattaaaagcacttttttcccctgctgtgcaaatacgacggcaaggttggccgcggttgtcgattttccttcttccgggccggcggatgtaatcaaaagggacttcacctccgtatcaacggaagaaaattcaatgtttgtgcggatcgtacgatattgttctgagttgatggatttcggctcagacatcgcaatcacacttcgttttccgagtttgtcttttttacgcgtcaacatgtccgccccccgcttgtttggtttccgccatcctcaagtttttggcaacgctgtcttttgtactgattgaagtaaccgttcccaggatcgggatgccgagcagcgattccagctgttcttccgatttgatcgtattatccagatgttccagcaaaaaggcgagaccgattccgcccaaaagtccggcggcaaacgcaatcgcgatgttcagcttacggttaggctctgccggtgactggctgtccgccgcttcggcctttgaaaggatgctgacattatccacgttcatgatggcggtgatcttgtcctgaaaaacggctgcaaccgcatttgccataacggccgcccgcttagcatccgtatccctcacggcaatcgtcacgacttgtgaatcctgctcgctggacactgtgattttcgattccagctctttcgaagtcatggacagatgcagctgtttaatcacttcgtcgaggatgaccgggcttttgatgatgacattatacgtgttgattaattggaggttggtttgaacgtcattgaattggacttctttttgattgtttttggattggctgaccaaaatttgagttgagttttcatagaccggcgtaagagcgaagaaactgatgagtccgcctgcggcagttgccgccgcggtaataataagtataaacagcagacgctttctcagtattgcgaatatttcctttatgcttgtcgattctcccatataacctccatatcactttccgcgtattcccattccctccaatgatcttttccaattacgattatacagttttaaactgtcatttctaaccttttcaaatgacaaaattcgacaaaaatagacaatcacttcaatctgttttatttttgtaagcgctttaaatactggtgtcacaggaagattaaaaaatcccgcggcaaagagcctgcgggattttatgttgcatatccatttttaatataagaaatcaaattctcaagcatttcttttgtggtcatctcagaggactgctcaccaatgtcgtgcgcatgcattaaaatcttcagaaactcctcttgatctaacttcgttttcttcatcattcgtttcctttcggcttccattaaattgaaaacaagattattatatgctgtcggatgctgttttgcaatctctaatacatcattcgacacattcgggtttttatgtccttttttaggaaaaactttttccgggccatgtgttgcgatataatagaggaattggaatctttttattttgtgactcgttaggagcgataatcatgcttcaggatatgattgctaaagaagatgtgctctcagcggctgaacagcttaaagaacttcttccttacaatgaagacaatgttcagctgatgaagaaagcactcattttatatcggcaggattccgtctatcgtatacaggttcaaaccccgacagagatttccgcatatgtgcaggatgttgtgcctgtaagggtcacgctgaacttatttttcatggtgaaaagcggctgcgcatgcccgtctgaggcgatctgccgccacgtgctggccgtttttctttacgtatatgcccaattcgagcgggtcggtacctttaccgaacattggctggaaagagaaaagcttgaggaaagcagggagcttgtccgccggcagtttcaggaaaaagtgctgccgaatgaagagtcgctgtcaagctggctcgctttttttgattcggaattctcgctgtgggaggcgcggacgccggccggaagccagacgatgcagggcctttattacggctatctgtcagcgctcaaaaaacacgccccgaaaaaacccgagcttaaaagcttatatcagattcattcggcgcttgccgtctggcttcacatgttcactttgattgagtcaggcagattggatgccgaaaaagattattacagcatcaatccatacgtggaacagctgatggatacgatttattcctccattgacagactgaaaacgtacgctttgtctttttcactcgatccctttttagaccggacgcccccggtgctccgcagactgcttgtgaaagaagagctttttcaatacgaacgcctccgggtattcggtgaaatgtggagcgcgcttttgaaccggccgaaatgggtcgcgcgtgaacaggagattctcgcacaggaaagcgggcgccgtttttcgccggaagtgcggttcggacggcttcatctggcctttttgcaaaaagatgatgaagcggtcttccaagatatgtcccgcttccctcctgaagcgctgccgtatacctttcaatggctcggtgaactcaccgcgaaaaaagactggaaacggctgaaaacatggtatggccggatcgagccgcttgccgtgaactatacgaagcttgataagccgtttaaagaaatgcgcgacattatcggagagctgtttgcgctattggcggattatgcgcggcactcacgggatgatcagctgtttgaacggtttgcttccggctgccttccctatacctttaccgaatacagccagtacctgtatgaaaaacgacggtacgcggagtgggtggagattcacagcctcgtcggtttttccgtctgggaaatcgaaaaggacatcctgaaggaaattgccgccagtgatccggaagcgctcatcccctcctatcaccgggcggcggccttttttatcgaccaaaaaaaccgcagcgcctataaagaggctgcgcgccatctgaaaaaactgcggacgctttataaaaaggcaaaaaaacagcaggtatgggagcggtatatcagccggctgagcgcaagttacaagaggctgcgcgcccttcaagaagaattgcagaaaggaaagttgattgatggcgagtcttaaggaaattttcattcatgtagaacaaatggaagattggacatttacgctgtcaagccatgatgagaaggagcagccgcttactctcagtcagatgaagactcatttgttccaatggcatgagtccaccttttacggaacgtttcttgaagacgtcagcttcatcggcaccccggccgttctgctcagcccgtggatgaccgtcgagctgctcggaaaaaactcgttcaattcattcagcaccgtgcagctgacaaaggaaacggaaccgttaatcgaagcggcttcgacgatatacgaatttattgccgacggcgattttcttccggattatgaggcttggcaaaatggcgtcctgcgtttcaaagaccgcgagcttttgctggaaggctttacggcagactggttctcagccgcggtccaggactacattcagtacaatgatgacctgctggaaaaatggcggcagatcgaaacccgctcgccggccgttcatacgtttaaaggctcctttttggatgaagatgattttctcgagggaatcggctggcatgacgatctgacgccgtttaccgtcgggctccgattaaacgagcctgatttcgacggtgacgactggaaaatcgaaatgtttttacgtgagaaaaaaaccggctccatcaccttttttgacggactgaagggactgaaaaaagcgtggcaggcatacagcggaaaaatcgcgcgcgaacaggaccgcttccgcagaacggttccctggctttcgtttgattcaggaacgacgctgatttctgaagaagaggcttggatcttcttatcggaagcgagtgagacgcttgtcgatatgggtgtggagattcttctcccatcatggtggcagattgtccgggacagcaatatgatgctcaaggcgaaagtgtcatcctcgccgcggggcgagtccttcgtcggcatgaacgctctgcttgatttcaactggagattcgccacaaacggaattgagctgacagaggatgaattcaatgagcttgtcgcaaacaacagacgtctcgtcaacatccgcggccaatgggtgaaaattgatccgcaatttattaaacagatgaaaaaactgatggaaaaagcggaatctgagggcctccacatgtccgacgtgctggcgcgcgaactgatggatcacggggaaaacggagccgaggacacggacatcattgactcatcggcatttgccgggatcaaaatcgaattatcaaagcagctcagaagcctgatccgcaaactgacggaagcccgggatctgccggaacatggagtcagcgccgcgtttcagggccagctccgcccttatcagatgtacggcatgaactggcttctgtttttacgggaaaacggcttcggcgcctgtctcgcagatgacatgggactgggaaagacgattcagatgatcgcttattttctccatgtgaaggaaagcggccggcaaaaagcgcctgccttaatcattgcgccgacatcggtgctcggcaactggcagcgtgagctccagaccttcgcgccgcagctgaaggccgtgcttcattacggcccccgccggccgaagggggaagcatttgtcccggcctatcaggacgcggacgtcgttcttacttcttacggcctgtcgcacgccgatcaggaagagctttcttccgtgacatggagcaccatctgccttgatgaagcgcaaaatattaaaaacgcgcatacgaagcagtcccgcgcgatcagaaagctgaaaggcgtccatcatatcgcgctgagcggaacaccgatggaaaaccgcctgacagagctttggtcgatctttgattttatgaacaaaggctatctcggcagtctgaccggctttcataaacgctatgtgctgccgattgagaaagaccgtgacgaaaaaagaatcaaccagcttcagcagttaatccggccgtttttactgcgccggacaaaacgggatgaagaagtggcgcttaatcttcctgacaagctggaacaaaaagagtttatcccgctctcagccgaacaggcatccctttatgaacagcttgtcaaagatacatttgaacatatggcttctctgaccgggatgcagcggaaagcgctgattttgagcatgctcggccgcttgaaacaagtatgcgaccatcctgcgctctatttgaaggaagaacagacagagctgttaaacgggagatccgtcaaactggaaaagctgcttgatttaatggcggcgatccgcggacagggggaaagctgcctcattttcacccaatacattcagatgggcaacatgatgaagcgcctcctggaaaaagcattcggagaaccggttcagtttttaaacggaagcctgtccaagcaggaacgcgattctctcgtcgaacggttccagaagaaagaatacccgacgctgattttgtcactgaaagcgggcggaaccggcttgaacctgacggctgccaatcatgtcattcactatgacaggtggtggaatccggcggtggaaaaccaggcgaccgaccgcgcctaccgaatcggccaggaacggttcgtccacgttcacaaactcattacgacgggaacgattgaagaaaaaattgatgtcatgcttgaaacgaaacaaacgctgaacgatcagattatccaaagtgaaaattggattaccgagctgtcatccgctgagcttgaagaactattcaccctcagcgcatcggcgcaatcacattaaacgcaaaaaggccggctctctcagaagagccggtcttttatgtcgtccttactgttacgccgcatttgccatgaatgcgtcacgccagtcatgaacagtatcgccatacctttcacagtaaattcctgatcatatgcgcaacgccgttttgatcatttgtcaatgtaacggcatcagcgatctctttaatatcttctctcgcattccccatcgctatgccttttccggccgcctgaagcattgaatagtcatttaagctgtcaccgaccgcggcggtttcagccatcggaatgccgagcttttgcgccagccgtttgagagcctgccctttagaggcgtttcgagacgccagttcgaagttgtgatcggcagagctgacaagggtgagatctttctgaccgctgaatcgatcccagcccgctttcagcttccgctcatcaaacgaaaatccgagaatattataaaagtccagatgctcttctttctcaaagagctcacggtatgaatgaatgtaagcaaagccggattggctgtattgcactgaagccgcctgttccaaaacggaaagatcggtttccggattggcgcttttcacccggtccatttcgatatcgagcagctgcctgccggtttcaggcgtatagatggctttgtttgtaaacacctcatagtaatattgattctcttcaagccatgacaaaatgccgcgggctcttgtttcttcaatcgcatcacagtggtacaggctgccgtcaggagcatgaatggcggctccgtttgcgctgatgacccacgtttttatgccgagcggttcgaatagggagtgcacgtcaaaatgcgcgcgtcccgtggaaaccacgatttcaattcccgcttgccgggcttcccttaaagcccgctcattttcatcgcttacttgatgactgctgttcagcagtgtgccgtccagatctatggcaatcagtttcacatgtcctcatcctcttcttcagattcagttacaagcaattctacgccgtgccggtcgagcagatcgcaaaaatcctgatcaggcagccgatcggtaatcagcaggtcaacctcgtgcaggtctgcatactgataaaaactcgtacggccaagcttggagtgatcgctcagcgcaatcacctgttcagcctgtcggatcattttacgctttaccatgccgtcttcttcatgcggaatcgtcaggccgttttccgagatgccgacaacgccgatcagcaccttatcggcgtgataatcccccagtttttctacgacggaagccccgtataaaaaccggtgttccttctggagctttccgccgagcaggtgaatatcaattccctcttttgcggaaaggatatcggcctgattgatcgaatttgtaataacagtgcagccggtgacatttaaatgctccgcgcaggcctgcacggttgtcgaagtgtccaggatgatccggtctcctttatggatcagggatgcggccagcttgccgattttgtttttctcttcagaaacggttttcagccggcccgaatagcccggaacttcctgattcaccgacggcagaatcgcgccgccccgtgttctgataatggccccgcgctctttcagctttacaaggtcccttcttgcggtatctcttgaaatatgaagcagcgaacatatctgttcagcggtaatccgccgatgctgtttcaaatattccattatcgcaatcagtctttcttcttgatacacgtcctcattccctttttcgtcacttatctgtaagtaattataagtttttatcccaatatattcaatgtttttaagtattcataagcaaaatcacttctttttaaccattttttagcttccgcacaaaaaaaccagtctttcgactggcgagtgggaaggaggtattgcggggcccgctgaaaggcgggaaatcgaggaaaaaacatgctattcagccagcggctctttccgtttttgatccataaaccgaacggtatcagccatgacctcggtcacataaacttttacgccgtctgtcttttcatagcttcttgtctggattctgccgcttacaccgaccattgaccctttttggcagtacaatgccgtgttttcagcgttttttctccagatggtgcagttgacgaagtcggttccggtttcacccgacgcgcttttaaaattgcggtttaccgccaacgtaatatgtgcgacgggaatgcccgctgctgtaaaacggagctccgggtctttcgtcagccggccgacaagcataacgtggttaaacaagccgtatcctcctctctttttcgaggctggcttcattgtagtacaagggctcgtgaaagcaaaaagcggataaagccgttattcgttcaggctgctcttatgtttttgtttttctttctgataaaaaaaacttttgtttttgaccgcttatgtaatatgtatttttgagcagccgcgagaaaagtttcgttttgagccagtctttctcaaacatgcggacaaactttccgccgtcccatgcgaaccagtaaaaactcagctttttatcagtcagtgaaagctgaattttatactgttccatgcggtcttttgtttcatataaaaagacgacatttccccttctgttaagatgcacctcacaatcttcctttttgcataccaagtaggaatgatcgtcttttcgccttgaaccgtcttctatatagatttccttcaggcgcaattgattcataagcatctctccatgaccatattcttttacattataatgaaaaaatagaaatgattaaatgttgaccgcctacaaaaatgatgaagcatgtcttacagcattttcccggaaaaaatgatatgtgttataataaatgaacgaaaaacatggacaacaggggtgaaaataagagatgaaaacctttaaactggttgatctgaatgtggaacgtttagataaagacgatcagccgattgagcagtttccccttttagacggattgattatcaacaaagaggacggagaaaatcactggttaattgaagcactggtcccggccgaacacttgtctttttttgacatgctgatgaaaagccagaaagaagcgaaggtgtttgtaacgattacgaaaaaaagcaaccgccccgcccagctgacgggaagcatcaaaaatatcgtcgagctggaaagaagtatacaagttttaatttacggtcaaatggtgtcaagaaaccaccccggatcagaaagcattctggagtcgctcgtgaaagaaggctactcgggcagccggctgattgaagcgtttaaacaaaaattataatcatgaaaaaggccggacgttaatcatccagcctttttttgtgccctagtcattgtgaggagcccgctgtttcagcagatctctgatttcagtcagcagttctgtctgctgatctgtgtcttctgcttcttcagcctcttcttctgcttcttttttacgtctcagcttgcctattgtgcggatcacgataaaaatagaaaatgaaataataaagaagttcacaatcgtttgaatgaagcttccgtacttgatatgagcatcgccgaatgtcactgccagccctgaaaagtcaagaccgccaagaagcaggccgacaagcggcatgatgatgtcttcaacgagcgacgtcacgattttgccgaaagcgccgccgatgacgacaccgatagccagatccatgatattgccccgcatcgcaaagcttttaaattctgaccacatcacattcacccctttctatacaaaatgggctttttataagcccatttgtttgcttttattctccgagcgcaaaagttaattcagcttcacacacgagctcgccgtcaactttggcaacgcctttgccgcgtccgatcgtaccgcgcgcgcgggtaatatcaacctcaagctccagcttgtcacccggttttacctgctttttgaaacggcagttatcaatccccgcaaaaaacgcgagtctgcccctgttttcttctttaatcagcatcgccacagctccgacctgcgccaaagcctctacgattaatacgcccggcataacagggtattcaggaaaatggccgttgaaaaaatcttcattcgccgtcacatttttatatcccgccgcccgttttccttcttcgacttccgtaattctgtctaccagaagaaacggatagcgatggggaataatttctttaatttgctgagtatcaagcattctcttgacatctccttcatcgacaatagtatgtatagaaggcatatgtggcaaccaatctgtacatttggaagtatattatgaatcaatttctttttcaaccgcgctgtaaactgtaaccagctggcaatgagcctcgtccattaatgtgttatgataaataaagatttttaccctatgcaaagaggttggaagatgattgctaagtttactgaaaaacgtacgctggtgatgctgaatgagtggtatgacgccatgggaaaacgccaattcgatctagcccgttcccttcacgaacaaatcaatcagcatctccccaaattacaaaagaacgcaaagctcaaactcagatatcagctgtttttcgcacggtttcagctgctgtttgagaaaaaagacggtctgactaaattgttctgcgagctgaagcggcgcaaagatgagatggatcatgaattaacttattatttctattttttcaaagggttattccatatggtgaatggcgctccgaaccgtgctgtctgccgctttaaagaagctgaacagtacctgccggccattcaggaccgtttcgaagccgctgaattttattataaaacagcgggtgcatattacatgatgaagtcgcctgcgctctccattcaatatgtcaataaagcgctggaaatctatcaagatgaagccggctacatcaaaaaaacgctcagctgccggctgcttctcgccgtgaattatatagacgaggcacgctatgacgacgcagaacagctcttcaatgaatccataaagataacggaccggatcaatgacaataacctgctgtgccacgcctattataattttggttttttaaagaccgcccagaaaaaagataaagaggccctccctttttacaaaaaggtattgggcaatcagcgtttcgagaaagagtctcccgtttcctaccttcattgtgtgtatgaagcggtcagagcactttttaaaaccggatctgccgccgaaggacaaaccgtgctgcagaaaggtttatacatatctgaaaaagtgcagaacaagattatgaaattgaagctgaccgcgctcaacatactgtacaccgctcaggaggacccgtacgaccgattgcagaagctcgtgctggagctgcagaaaattgaagcgtgggtggatttggaagtgctgcttcaggatattactgattactacaaaaaaaagggcgattttgagaaagccgcattttttatcatgcgcggctgatcaaaacgccccttcttttatctgactgagttgattaagcccagcatttggtctcccaatgtaatcgtgcggctgttcagctgataggaacgctgagacacgattaagccggtcatttcttttgacatatcgacatttgaaccttcaagcgcgccctgctccatgccgattgcctgccggtttgcgccggtaaggtcttcaatcgctgaagcccccgcgccgtttacggaaaacagattatccccttccgcatgaagcgcctgcggattattgacattgacgatgccgagattaaacgtctgcgaacgggttcccgcctggtctgaagcagtcagcgttccggttttgctgattttcagctgagtcagcgaactgtcaatttgtatgggctgaccgttctcatcgagaatgggattgcctctcgctgtcatcagctgaagcagccggtcatttccgccggccggcttgagggaaagtgagccgtcccttgtatacacccgccgtccgtccgcttctgcctgaagatattgataaggtgatgtgaacgcgatatcaaggtcacggtcggtttttttgatgcttccctgccctgagtccagctgcggagtcatcaccgttccggcgccgagacgcaggccgggcggcgttttccgcatgttcggcgaattttcctttttgtcatctatatggtcatattgctgtctgatcagctcggaaaagcgggagtccctcgctttatagcctgtcgtatcactgtttgaaaggttgctgctgactgtatccatctgctgctgaagctgatgtaaggctgttgaagccgtcagcattgatctgagcatcataattgaatatcccccattttgttacactttgccgatttcatttgcggctttatccatgcttttatcgtaagcctgaatgactttctgattggcttcaaatgatctgtatgcttccgtcatttctgtatacgtgctcgtcacgtccacgttcgaaagctccgagacgccttgctttaatgaatacgagacttggggattcgccgccgcgctcggcagttcagagccgtcggccgtgctgtataggtcattgccgtcccgtttcagattgcgcacgtcttcttccattctgatatcaatctgccccgccggccggccgtttgtcgtgaccgttccgttttctgatacggtgaatttttcattgtcgactgtaatcggctgtccgtttgttgataacacaaggtttccgtttatcgtaagctgattgttttcatttaatgagaaagtgctgctttttgaatagcggacgccgcctgcggtctggacgggataaaacagctcggcgttttcattcgtttcggcattcttgggaacctgattctccataagcgcgatatccgtcggctgatcggtcgttttcaggcttccctgcgtaaacaacggtttcagctcctgcatgtatacgcctgtgttgacggagccgattttcgtttttttgtcgccttctattcggctcagaagcatctcgggaaaggcgcggattgaaccttgatcctctttgtaccctgatgtattcgcgtttgcgatgttatttgacagcatttccgttcttctctgctgtgtaatcattgcggacgttgcggtatataatccttttaacaagtcttccacctctgaaatagcattatttccagttgcctcaccggaacatttgttctataatgaaaatcagcattttttcttattatcggatttacattcccgttcgtgaagggtttgacagaaaaaaaccccattctttttcagaatgaggttttatcatcagctcagtttgcgttttggaagcttgtccatgttatccagcatgacgccggttccgaccgcaacacaatccatcgggttctcagcgacaagaacaggcaccctcagctcttcggcaagaagctggtcaagcccgtttaacagcgctccaccgccggtaatgataacgccgcggtcgatgatgtcagcggacaattcaggcggtgttctttcaagaacctgcttggcggcctgcacaatgacggcaactgattcacgaagggcttcttctacttctttgctgtttactgtaatcgttctcggcagaccggaaaccatgtcacggccgcggatggtgatttcttcatgacgtgcgtctgggaaaaccgttgcgaccttcaccttaatatcttcagcggtacgttcaccgatcagcagcttatactcgcgtttgatataatttaagatttccatgtcaaacttgtccccagccatcttaatagaagaggaggtgacaatatcgcccatagaaataactgcgatatctgtcgtaccgcctccgatgtccacaaccatgttaccgctcggctggaagatttccatacccgcgccgatagcggcaactttcggttcttcttcaaggtacacatgctttccgccgcttttttcagctgcttctttaatcgctttttgctcaacggatgtaatattcgtcgggcagcagatcagcatgcgcggttttgagaaaagtccttttacattcagcttattaatgaaatgtttcagcatggcttctgttacttcgaagtctgcgattacgccgtctttcagcggacggatcgcaacaatattcccaggtgtacgtccaaccattcgtctggcttcttcaccgacagccagcactttgccgctgtttttatcaagtgccacaacggaaggctcattcagaacaattccttttccttttacatggatcagtacatttgcagtaccgaggtcaattccaatatcccttgcaaacatctatttatatcctccttgatatctgtttcacagtaaaatatccacattgtgccctaattatatatattatcataatttatcaaaaaaaagctgctgaacgatataagttcttgacaaaattttgcggatattcgcgaaaccgcccgggaggagaaaaaagggcccggcagacgtcaggcgctacggctgctgaacgggctccccttcaagaatttcatccttcttgtactttaatttcgtcgcctctccccctcttaaatgtctgatggatttatgataatcgagtatttcttttacttcattcgccaagtcaggattgatttcaggcaggcgctctgtcagatctttgtgtacggtacttttggaaacaccaaactctttcgcaatgacacgaacggtttttttcgtctccacgatatacttgccaatcttgattgttcgctctttgatgtaatcgtgcacaccactcgacctccccagttggatgtgagaagtgtgaaatgagatccgtattctgtaacagattcactgatgatgcagcttcttcgttgtccgattatataagaaggttttagaaatatgcccacgatccctcacctcaaacactctctttgataggtttgtaacagtgtattagcaatgaattgggaatatgctaaaaactcaataaggacaaggggcgggtcataattttctgctttttggtcggggggtttacatccgcgtgatcctgctgtagaatgaaacagcacaattagttacttaggtaagttttttgaaaaggggaacggaaatgatccacgtcaacagacgcctcattcaccaaatcaatcaatgcgcccgcctgattacgaagaaagccaatgaacggctggaaccattcggcctgtactcctctcaatggtcaatcctatattgcttaaaaacgatcggaccgatgacccaaaaagaaatctggtcctatctgaacgtagaggcgccgaccgttaccagaacgatcaaacgccttgaagaaaacggctggattcagcgggaacagggagaagacaagcgggaaaagctcgtcgtcctgacgaaggaagctgaattgaaatacgacagcatcaatcaagagatgctgaagttcgaggaagacatgcttgcggatttccaagatggagataaggaagctttttctgagtttctgaatgtgtttttaacgaaatagaaaagaaagggaagtgctgtacttttgagtaaatctgactcgatctggaccaaagattttattatggtcgtactcgtgaatttatttgtctttgtgttcttttatacatttttggccgtgctgcctatctatatgattcaggagcttggcggcagtgaatcgcaaggagggcttttgatcagcctgttcctgttatctgctattatcacccgtcctttttcaggggcgattattgaacggttcggcaagaaaagaatgacgattgtatccttggcgctgttcgccctgtcttcttatctgtatttgccgctacacaatttctatctgctgctcggactgcgttttttccaaggcatctggttcagcattttaacgacggtcacgggcgcaattgccgctgacattattcccgccaagcggcgcggcgaggggctcggttattttgcgatgtctatgaaccttgccatggcgatcggtccttttctcgggctgagtcttgtgaaagtcatttcgttcccggttttctttacgatttttgccgtatttgtttctttaggcttgctgattgcttttatgattcgtgtgccggatcaaaacaacagcggaacgactgtcttccgtttttctttctccgacatgtttgaaaaaggcgcgcttaaaatcgcgattgtcgggttgtccatttctttctgttattcaagtgtgacttcatatttatccgtttatgcaaagacgatccacctgttggatgtcagcggctatttcttcgtctgtttcgccgtgacgatgatggccgcccgtcctttcacaggaaagctgtttgacagagtggggccgggaatcgtcatctatccgtcgattatcgtgttctccgcgggactttgcatgctggcgatgacaaacagcgccctcatgcttctcttgtccggtgccgtaatcggtctcggatacggctctatcgtaccttgtatgcagacactggcgattcagaactcgcccggacaccgttcaggctttgcgacggctaccttcttcactttctttgacagcgggattgccggcgggtcatatgtattcggcctctttgtcgcttcggccggattccattcgatttatctggccgcggggctgttcgtcctgattgctttgctcctgtatggctggagccagaaaaaaagaacgccgcttgaagcggacggaaacgtttcaatcgcagactgatatgacaaaaagccgggggcaacccccggctttttttattcggccgctctttcccgcacgattcgtccctccgcttttgcataaggaggatgaatatacataagcgccgtataaccgatacatgacaaaatgacacccgcaaaccaggaaatatcatagatgccggcgaacgccgggacgtacatcccgattaaagaaataaacgcgccgagaaaggtcgcggcaaaggcccggtaattatagcctttgtaataagtgtactgtccggtttccgaataaaggtcttcaactgagagccgcctttttctgatgataaaataatcagccatcatcaccccggctaccggtccgagcatcccgccgatgagtccgagaaacgcataaacattcgtggcgctctccatcagcttccacggtattgtgaacagagccaaaacggcggtcaaatacccacccctcctgaatgtaatatacttcggcaggacattcgccaagtcataggccggtgacacgatgtttgccgccacgttaaccgagacggcggcgatgcaaagtgtgatgaccgaaagagcgataacaaaaggattatcaaaccgggccaaaatctcgaccacatcccaaatcggttctccgaatgctacttgtgatcctgatgtcaccgtgatgcttgcaaacgcgaacagcgcaaacgttcccggcagcccgtaaaactggccgcgaatctgttctttttgcgacgcggcgaaccgggtgaagtcagggatattcagaatcagcgtcgcccatattccgataatgcccgtcactccggcggcaaacggccaaaacgtttcagaaaaggtatggaactttcccggctgtgagtaaatcggtccgagcccgccggcaatatctatcgcccaccagaccatgccgccgaagacgagataaacaagcgggcccgcccacacttcaaattttttgatcgattccattccgtgccgcagcacaagcagatgaatgccccaaaagaaaataaacgacagaaaacccggcagatgaagcccgaatatattccaatctccgccgagactcccccagcccggccatatgttcaaaagcagaatgtgcaaagccgtgctcccggcaaatgtttgaattccgagccacatgatggctgtaaacgccctgagaagcgccggaatgttagcgccgtatattccgtaagaagccctgataatgaccggaaaaggcagtccgtatttcgttccggcatggccgttcaaggccaaagcggcgaacaaaatgagtgacgccgtcacgataatggcgagcacctgccacggagaaagaccgatcgcaatgagcccgcccacagtcgcgtaggtcgggatattatgaatacaacccatccagatggatgcaaaattcaccgctttccatgtccgttcgccgtcttctaaaggcagtaaatctttgttgcttagccgatcactcgttgtttttttcattttttccctcccgcatgtgcgttttccttacatcacatgtgaaaaaatataactgaaaattccgtaaataacattggtcgctgtcgacaataatcgttttgatttttgagcacattacacaaaaaaagagacggggagagcccgtctctttttgttgcgcctgttaagaggcttttttgaggagaaccgaaaaccggaacgccatcaaaaggcttacagcgccgacaacgataagaatcgtcccaagcatatgaaaatggccggcggtaatttcttttccgaaaagaatgcccaaaatgacagaagacaaaatcgaaccgagataccggcaggtctgaaacaggccggacgttgttccggccatgtcggcggggctcgttgtcagcatggccgcctgaaacgtgacatttccgaagccgtagccgacacccagcacggacaggatcagtccttttcctatcatgggcgcctgaagaaagaaaaacgttaacagcaccgccccgatcgcggtcaggcaggttccggcaacaatcggctgaagaagccctttcttatctatccattttccggtcagaggcgacaccagaatactcatgcccgacataaacagcataatcaacccgcttgtctgaacggacaaatgcatttcatcctgaaaatagctcggaagcccgaaaaagatgcagtaaaagaatatattcagcaaaataaattgaatatacaccgacgatagtttccggtgcgttttaaacagcctgacatcaataaacggcttctccgttttcagctcgcgccagataaacagcccgacaaacaaaagcccgaaaacgccttctgtatagtgaggcttcgtactgaaggacaataaaaacgacaggagaaggataatcgctccggcaaacagaaatatcccgatcgtatcaagctggcggagcacgcctttcaatccgccgatctcgcgtttttcatctttcggaaacatatacattccgagaaaaaagctgagaatgataaacggcagattgacgaaaaagattgccggccaccctccccaaacgatcagaaaaccgccgagagtcggaccgagcgccgtcatggctgatgcaaagattgacaggacggccagcgccgaagcctgcttctcccgtatatttgaacggatcaatccgacgccggacggatatatcgcgctgcttccgatcgattgaaaaagccgcatgatcagcaaagtcataaaagtcggcgcaaacggcgcgccgaccgccgagacggcaacaagcagaagcccgataaaaaacagcttcttcctgccgagcatatcaccgagcttcccggtaacaggctgcgccaccgcgctggccagataaaaggacgatatcagccaggacaccgttgtaaacgacaggtgaaattcatgctgaatactgtgaagcgcaagagaaatcatcgacgagttcaatgggttcagcatcgtccccgaagccacggccgtcaagaacaggacgcggctttttttggagattgtcattttgtctgtgcgataaattcttccgtcgtccggcttctgccgattttcgggaagataaacttgagtgtcgcttcgtgctgttcatcgctgaatgtcgccatcgcgtcagttacgaaaacttgctgatacccgagctgaaaagcttctcgcgccgtgctttccacaccgatgtttgtcgcaatcccgcataacacaatcgtgtcgatcccccgtcttctgagctgaaggtccaggtccgtgccgaaaaacgcgccccactgccgttttgttaccgtataatcgttttctttcactccgatgtcaggcacaaattcagcccaatccgccggcggagccgaatggcccgccgcctcttcatccgtcagcggcttcagcgcatccgctccgtcatgaaaatccacgttcacaaagctgataaatccgcctttttcccggaacacatcaattaattttttcgcgttcggcacaacggtaccgcttttatcaatcggcacaatgcctttttgtaaatcaataaggaccaaagccgttttttcaaattgcagatttaatgatgttgtcataatgattcctcctgatgcagttagtgtttctcaccccgtttattttactctttcccggacaggatttcttacgccgtgctccggcgctctttttatggatataaagtcgcacgacacccatttgaaaaagcagcattatgaacgcaaaaaaccatgttagataaccttacacgaaaatgttttatcgttcttttttctctataataatgaattaatcacaattacattctgaatgagacggaggaatacaacatgcagatgggcgatacagtatttatgttcttttgcgctttactcgtgtggctgatgacccccgggctggctttgttttacggcggaatggtaaaaagcaaaaacgtgctcagcacggcgatgcatagtttttcttctctcgccatcgtatccgtcgtttgggttttgtacggatattcacttgcttttgcccccggcaatacatggcttggcgggattgaatgggcggggctgaagggggtcggctttgaacccggaagttacagtgatacgatcccgcattccttgttcatgatgttccaaatgacgtttgccgtactgacgacagccattatttccggagcatttgctgaacgcatgagattcagtgcttttcttgtattttcctttttgtgggcttccctcgtatatacgcccgttgcgcactgggtatggggcggcggctggatcggccaaatgggcgctcttgacttcgcaggcggaaacgtcgtccacatttcttccggagtcgccgggcttgtgctggcgattgtgctcggaaaacgcaaggacggcacggcggcttcgcctcacaacttaatttacacgttcttgggcggagcgctcatttggttcggatggttcggcttcaatgtcggcagcgccctcacgcttgacagtatcgcgatgtttgccttcattaacacaaacaccgcggctgcagccggaattatcggctggattttaatcgaatggatgctgaataaaaaaccgaccatgctgggcgctgtatcgggcgcaatcgcagggcttgtcgccattacgccggctgccgggttcgttacgccgttctcttccatcgtaatcggtttcatcggcgggcttgtctgcttttggggcgtttattggctcaaaaagactttcggttatgatgatgcgcttgacgctttcggcctgcatgggatcggcgggacatggggcggcatcgcgaccggtttattcgcaaccacttccgtcaatgacggcggggcaaacgggctgttttacggcgatccgggactgctctggaagcagattgcggccattgcggcaacctatgtatttgtatttattgtcactttcgttatcattaaaattgtaggtctgttcattcccctgcgcgccagtgaagaagaagagtcacttgggcttgatttaacgatgcacggggaaaaagcatatcaggacttataaagtgaggagtggcttagatgagcggtcaaatgttcaaggtagaaatcgttacgcgtccggctaagtttgaaacattgaaacaggaactcggtaaaatcggagtcacatcgctgaccttctccaacgtacacggatgcggccttcaaaaagcccacaccgaactgtaccgcggagtcaaaattgagagcaatgtgtatgaacggctgaaagtggaaatcgttgtcagcaaggtccccgttgatcaagtggtggaaacggcgaaagaagtgctaaaaacgggagagcccggagacggcaaaatattcgtctatgaaatcggaaacacgattaatatccgcaccggagaagaaggaccaggagctttataaacaggcagaacgcccggagacagaaatgtcccgggcgttttttccagcttcattaaaaagaagaaacctttttttcatgcgggacaggccgcttatgccgtacgggttgttttttcgcatatgtactgatattgaccagtatgccgcacaaaaacagcgtcataattaatgaagaaccgccgtagctgataaacggaagcggcacacccgtaaccgggagaagtccgctcatcgctcccaaattcaatacaacctgaaacattaattgaaacgtaattccgatggcaagaagcttcccgaacgggtcatcagcccgcacggccgtttttacgccgagaagcattaacgcaaaatacaatcccaaaacgatcagaacaccgaatatccccagctcttcgctgatcacggccataatgaaatcggtatgcgcctcaggcagatagttcattttttcaacactgtttccaagccctcttccgaaaaatccgcctccggaaatagcaaaataggattgaatcagctgatagccgtccccgttcgcgtcaccaaacggattggtaaaggaaacgaggcgcttcacacgataggaggcggaaaatgcgagataaacaaccccggacaccgccgtcgcgccgagcacgaacagatggcgctttttcaagccggcacataataaaatcgacccgcacgccgccaggattaaggaagccgtccctaaatcaggctccgccaatgtcagcagaaaagcagttcccaaaatcactaaaggcggcagaacccctttcacaaattgatgaatgtacggctgctttttcgtataaatcgaagcgaaatacaaaatcatcgcgatcttcgccaattcagacggctgtacgacaagcgggcccgctcccagccacctgcgggaaaaattccgctccagcccgattcccggtatcaagacgagcagcagcaataccagcgaaccgaccacaaacagcggtacaagccgcgcataccgcttatacggcagacaggcggcaaatagaaataagcataatccgatcagtaaagaggtactttgtttatggaagaaataggatggatctccataccgctgagaccccatcacatcactggcgctgtacaccattaacaagccgaatccgcaaagcagtataatgacaaacacaagcggcagatcggcgtttttcaaacgtttcagcaacggacaaaactccttcggctattcttttcccgcatacttgacgcacagtaatacagtcacgtttcattctgtttacttttttatgattatttttaataccaattgtgtctcatagaaaaaagcattacactgttcatataaaataaagataaaaggtgatatttgtgaattacgaactatttaaagcgatcaatggtttgtcgcaccatagtgccattctcgactctatcatggtatttattacggaatacgccatttacgcctacgcccttttcctgcttgccatgtggctgttcggaagcacaaaaggcagacaaaacgccctgtacgcgggcttcacgggtgttgcggcgcttatcgtcaactacctcatcacgaaggtctatatcgagccgcgcccctttgtcgaacatacggttcatacgctgatccctcatgccgcggatgcttcatttccgagtgaccatacgacaggcgctttggcgatttcaattgcgattctgttccgcaacaaaaaactcggctggccgcttgtgattttcggccttttgaccggcttctcaagaatttgggtcggccaccattatccgatcgatgtgctcggaagcattatcgtttccctcattgtcggattcctgctgttcagattttcaaatgtgcttcgtccgattgtcgatctgatcgtgcgaatctatgaaagtatcgttcataaaagcaaatcgacaaaccataatatataaaaaaaagccggcgtctgtcacagactgccggtttttgtatgtttggctgtatgctttttcctttgtaaagcacagaatgcggcaatgccgagactgtcaatcagcacatcgcggaggcatccgtttctgccgaaaaagagctggacgatttctgtcaggaaagcggcggccaatgcatacagcaccgccctcttcatgcgcctgcgctctctgaaaaacaaataggcgagcacaaaaaatgaaaacgcgtgcccgagcttttgaatcgccgcttccggtatggcgagctccgccatatcgaacacaaagaaaccggacacatccggatgcggcgtgaaacgaaaggacaccgtctgcgacacaaccatatcgtgaaagctttcagtcaaagcagaaacgaaaacaaagacgagccacccggccgccagacatttattcattcagcatctccttcgttttctactagtataaaggcacatgcgggaatatgaaaagcgcctatctgagctgataggcgcttcgggatcaagattacttgcccgaatctttcattgagccgtcatctttaccatctgtcttgtcttttgtgccgtcctctttgtcacctggtttttcttcggtttcttttttaggcgtcacatcttttttctcagaagactgctgaattgacccttccgtttcttctgtcacagcgtttttctcttcagccgccgctttttcaatagatgttaccggcttgtccataaaattgagcgggttcatcgctacgccgtccttgcggatttcaaagtgcacgtgatttccgctttcttcactgtaaaggttttttccggatttaccgatgacctggttctgctttactttgtcgccctgatccacgctgacttcagataaagactgatagacagtagacaggccgtctgagtgttcaatttcaaccacatatcccagtaccgggtctttagcagctttaacaaccgtaccgctcagagaagcagaaacatcaaatgattttccgtctttctcagctaagtcaattcctttactgaggctgtacgtgttattatagttaacaagtgctgcttctttctctttttttgcggcatcagtttcataaaactttttcacaacagaaacattttcagaatgagcagccggcattgcgacgttttccattgacttgcctacttcgacggcatcgtctttgccgctgtcatacgcagagtttccgccgttgttcgtcagattgtccttcacatcattcgaaacggattgataccaaaggacagctgttaaaatgacggccgcactgactaagtagattgcagggaatatccagcgtttgcgaaaaaaccgctgaagttttttgacttgagaagttttcttttcttcctctctcatttgttcatcacctcagcaacattctgaacacttttctgaaaatatatacacatccataaaaaacttttttggaaatagtatgtgcagattgcacttgattatgtaataaaatgtgaagggagatcccggaatatgaatttgaccctgcgcaaagccctattggaggatttagatgcggtggtggccatatacaactcgacgattgcctcacgaatggtaacggctgatacggaagaagtgacgcccgaagaccggatggattggtttttgcggcacacggaccggcgcccgctgatggtcgcggaagatgaaaccggcaaagtggcggcctggatcagctttgaaacgttttacggccgtccggcctatgacaaaacggcggagatcagcatctatctgcatcaggattgccgcggcaaaggagcaggaagctttctgctgaaagaagccctggcactcgctccggcaatcggcatccgcagcctgatggcttttatcttcggacataatgtgccgagcattaagctgtttgaaaaattcggttttaccgaatggggcgtattcccgggtatcgccgaaatggacggaaaacgatatgacttgaacattttagggagagaactgtcatgatcaccatcgataaagagaaagacgaaaaccagccgctcaataaaaaagcccgttcccttgccgacatcgccaaatggggaaagatcaccgccgtgtttctgatcatcacaggctctctttccgctctgtcagccattgtgacgctgctcggagccattccgggggttctgctcatcatttccggcgtcatgctgatgcgctcggcaaaagcggctgtcgcacttcaggaaggactagaagaaaacgcggaagaaaatatgcttgcacattacgcgtcatttatcaaaatgcagtttttttacgcggcatccagtgtggtattgggcattctcgcttttattttagtcgtcatcttcgctgtcatcggaattatcgcttatcacagcactgatacgtatgacacgcctgattcatattactatgagaacgacccggtgtttgaatgacaaaaagagctgatcgcgcgtcagctcttttttaataaagcatttcttttttccggtcttcttccgttaaaaattcaataaagctcttcatcgcagacggctcctcggcaatcagccgggtataggcgcttttccgttcctcggacagaatatcgctttttctgattctgttcagcatataaaggcggatcgttttttgcacctgtttccgctgatagccggcttccttaaaaaacgcaagacccagagccgcaaggagggcaaaaatgccggccgatacgagagctcctctcccggaaggggcctgaatcaaaagcgatgccagatgaaacagactaaaagcggcgagcgggaaagcaagaaaacggtaaatgatgctttttttcatcagcggcgcgatggcgatttgtattttctgaatttctttttttatgaatcccggcaattgttccgcatgctccagcttcatgccctctcccctttgctgtcatttttgtcttctttttcatatatgcatattttaccgcacccggaactttctttgaaagaaaactgcattcatctttgattccggctctttattctttcaaaatgtcaatgttataatttgaaatgggaatcagattgctgcacttgtcggaatactaatgggcacagtcttgataaatatgatatagcggggttgcaaagtgagcatttcatttattttattcggattttttttcgttttaaatatacttttggccgtcatcatgattttcaaagaaagacgcgatgccagcgcttcatgggcttggctcttggttcttttttttattcccattttagggtttattttatacctgttattcggccataacctgagacgcaagcatctgtttcagtgggaagaccgtaaaaaaatcgggattgaaaagctgctgaagtctcagctgaaggatctgaagtcgaggcaattccaatttaacaacagggcgactgtggataataaagacctcatctatatgcttgtcatgaacaaccacgcagtctttacagaggataattcggtggagattttgacggacgggcgcgataagttcaaacgcttaatgaaggacatttccaacgcaaaagatcacattcaccttcaatactatatttataaaggtgatgaactgggaaaaaaattgcgcgatgccttagtgaaaaaagcacgcgaaggcgtaaaagtcagagtgttatatgatgaactcggttcaagatcactcagaaaaaaattcttcaaaccgctgcgggacgccggcggccatgtggaagtcttttttccttccaggcttcgtccgattaatttgcggctcaattaccggaatcaccgcaagctcgtcatcattgacggcgaaaccggctatgtcggcggctttaacgtcggagatgaatatctcggcctgaatccgaaattcggctactggcgcgatacgcacctcaggcttcaaggcacggcggtacacgccattcagacacggtttatcctcgattggaaccaagcctcccatcatcatacgctcacatacgttccgaatcattttccggaatgcgagccgaagggcaatgtcgggatgcagattgtcacgagcggaccggactcagaatgggaacaaattaaaaacggctatatcaagatgatctcaacggccaaacggtcaatcctgattcagacgccttactttattcctgactcaagtcttttagatgccctcaggatcgcctgtctgtcaggcatcgacgtcaaaatcatgattccgaacaagccggatcacgctttcgtttactgggcgactttatcttacatcggcgatcttttgaaagccggagcctcagtctacatttacgataacggctttattcatgcaaaaacgattgtcgtcgatgatgagacggcttcagtcggtacggcgaatatcgacgtcagaagcttcagacttaattttgaagtcaacgcctttatttatgacgtcaccattgcgaaaaaactcatttcctcatttaaagaagatctgctcgtctccagaaaatatacgtatgaagaatatcaggagcgttcgctgcggatccgcattaaagaatcgatttcaagacttctttcgccgattttgtaattcccggggtgtttctcgggaattttctgatacaaaaacggacacggcatgaaaaaacacattttatattcaaaagaatgaccgaatagtgtataaatgaaaagtgagtatttttttgtaaaggagtgccatagtttgaaacctgaatcagtgaatcgttcgcttatttctatttcgaaatggggaaaagcgacaggtattttatttattatcgtgggtgcgtttgcggcgctgtcgggcgcgtttttctttttaatcggagccattcccggcgttctgcagatcattgccggcatttttctgatgcgctcggcaaatgaagcgggacagatggcggagcagttcaatgaactgacagaggaacatatgctggagaattatgcaaagttcgtgaaaatgcaggggatctacctgattgtgacggtcggcttgtccgttctcggtattgttctcttcattgtcctcatgacgctcggcatcgtggacggcgtgtttaataatattgatgccaatacatattaaaaaggaaaatcccggcgcatccgcccgggattttttcttattccgcttcttcgacaacgggaaagtttttctgctctggatttgccaatacggcgatggcataatagcgcagctgagacgctgtctgcagatattctttcagacattccggcttcagccagacgtgtcgccgtcacatcaaaaaaacttttcctcagagtttcaattgaaatcactcaattgttcgactgttcctgatcaggtttagaagcaagaattgtgattctgcaaaataaggataaaagccctgatggaacaagatcacttatcatacagttttttgggtctttgtaattaaattacaattgttcttaatattcactcatgtattcatgctattatattgaaaggaacgatcaaaagcgttggcgttcgttaaatatttacgagtgctcctcatgtcaaagtcagaaaaaatagtataggaggtaacatatgtttaagtttaaaaagaaattcttagttggattaacggctgctttcatgagtatcagcatgttttcggcaaccgcctctgcagctggcacagattactggcaaaattggactgatgggggcggaacagtcaacgctgtcaatggatctggcgggaattacagtgttaattggtctaataccggaaatttcgttgttggtaaaggctggactacaggctcgccatttagaacaataaactataatgccggagtctgggcgccgaatggcaatggatatttgactttatatggctggacgagagcacctctcatcgaatattatgtagtggattcatggggtacttacagacctaccggaacgtataaaggtactgtaaagagtgatggaggtacatatgacatatatacaacgacacgttataacgcaccttccattgatggcgataacactacttttacgcagtactggagtgtccgccagtcgaagagaccgacaggaagcaacgctgcaatcactttcagcaatcatgttaacgcatggaagagccatggaatgaatctgggcagtaattgggcttatcaagtcttagcgacagaaggatataaaagcagcggaagttctaatgtaacagtgtggtaacagctcatctttaatgaggggcagctaacgggctgctgatcgttccttgagaaattttataatgattgtgaagaggcgaacggttttggcattaccggaggcaggatattctccatcagtttttttagcgcgtattaaaataagagttccgtctttttttggtaacccgcttacaacagacaccttcacataagccttaagcaaaataaaaatatcccggttaccacctcctttagtttcggaggatttcttcattaaacagatcgcaatcccgcatccaggcttgtctgaatatagagccaaaaccgtgatttcctcattatccattgtaaccatttccgttacacctctagcggcatgaacccatctctttttaacaaaagagatgattcattacatcataaagggacttgctcgcaagttcattctccattgcccgctgtacgcttccgaacgtctcatcgagcgcgcgctgaatatttttgccgaccggacagtcggggttcggattgtcgtgaaccgcaaaaagctcttccttattctgcaccgccctgtaaacctctaagagggtgatctccgacggatcttttttcaggctggctcccggaacacccgctcgggatgtcagaatacccgcttttttcagctggctgatcgttctccgcacgacgacgggattggtgtttacgctacccgcaatcatatccgatgacgcccgttcatccgttgagatcagcgatagaatgtgaatggccacagcaagacggctgttaatcatgtttttcaccaccgttgtaaccacaatagttacatttcatttgtttgtcaactactaatatacactaaaacgggcggcaggatgaaatcaagttggcaatagaagtgtaaacaggccggcgggaaaccggccggagagggattaaaataagaaataacgctgtccgagcggaacatagctgacgggctggcatgccagctcttctccgtcggcgaacacctgataggttttcggatcgacttgtatattcggcatcgcgtcattcagcttcatgtcgagcttactcagcttacggatattccgtacgggagaaatcattttttcaaggccgagcttttccggcacaccgtttgcgataccggcctgggacataaatgtaatagaggtatttcggtttgctttaccgtatgatgcgtacatctgccgcataaacacgggctcaggcgtcggaatggaagcattcggatctcccatctgggcgcgggcgatcatgccgcctttgagcacaagttcaggtttgacgccgaagaaaaccgggtcccatagtacaaggtcggcgagctttcctttttcaacggaaccgacttcatggctcaggccgtgagtgacggccgggttgatcgtgtatttggcgatatagcgtttggcgcgcacattgtcattgccgttttctcctgatagagcgccgcgctgttttttcattttatcggcaacctgccatgtccggataatcacttctcccaccctgcccatcgcctgcgagtcagacgacgtcatgctgatcgcgccgatatcgtgcagaatatcctccgccgcaatggtggccgctctgatgcgtgaatgactgaacgccacgtcttcaggcacttttgaatctaaatgatggcagaccatcatcatatcaagatgctcgtccatcgtgttgacggtatacgggatcgtcggcgtcgtagaggacggcaggatattggcgtaagatgcgagtttcataatatccggtgcgtggcctccgccggctccctctatgtgatatgtatggataacccggtcgccgatcgcatcaagcgtattttctaaaaagcccgcttcattaatcgtgtctgtgtggatcgccacctgaatgtccgcctcatccgctgcttccatgcaagctttaatggcgcttggcgttgatccccaatcttcatgcagcttcaggccgatcgcgcctgcttccacctgctcgatcagcggcgctttatcggatgcattcccttttcctaagaaaccgacgttgatcggaaactcctcggccgcttccagcattctcgacatgtaccatgcaccggatgtacaagtcgtcgctttacttcccgtcgcaggacccgttccgccgccgagaagcgtggtcacgcctgaagaaagcgcgacttccatctgttgcgggcagataaagtggatatgcgtatccaccccgccggccgttacgattttcccttcgccggaaataacttctgttccggcaccgataatcatgtgcgggtccaccccatccataatatcaggattgccgctttttccgacgccgacaatccggccgtccttcaccccgatatccgccttgacgattccggtataatccaggataaccgcgtttgtaatgaccagatcaagcgctccgtctttcccggtgatacgcccgttctgccccatgccgtcccggattgttttccctccgccgaaaatcatttcttcaccgtaattcgtgaaatctttttcgacttcaatccataaatccgtatctccgagtctgactttgtctcccgttgtcggtccgaacagttctgcgtattgctcacgtgacattttcatcggatcgcctcctccatccatccggcttttttaagatttgacagagtcttctcttttccccgctcatccatatacgtatcggccatgccgttgagacctctgaccgtttttcgccctccgatttccacgagcgtgacggttttctcttctcccggttcaaaacggacagatgtgcctgacgggatatcaaggcgcatgccgattgctttgtcccgattgaaggaaagggcgccgttggcttcggcaaaatgaaaatgcgatcctatctgcactgaccgtgttccgttattggtgactgacacctccagcgtcttccggccttcattaatggtgatgatcccctttgcgacttgaatcgctcccggcttcatgacttcacctccgctttgatcggctgatgaacggtgacaagcttaaccccgtccgggaacgtcgcttccacctgaatgctgtccagcatttccggaacgccttccataacatctttttccgtcaatacattgcggccggattccatcagctcagcaacgctttttccgtctctcgcgccttccatcagatagcaggtcaaatatgcggcggcttcgggataattcagcagaacgccgcgcgccttccgctgcttagcgagctctcccgccgtaaaaataagcaatttttcttgttcaaccggtgtcagtttcatctgtattcccccttagtgatagtcaaacacaatccgcatggtcataccgaaacgatgcaggcggccgtcacccccttcacctcatgaaatgttaagtgataaaagttattcgacggtgaacgacccgattccttttgcagaaattaccgatttctcatttttttcttcaacaaacgtttaatcaaatgtgaagaaaggttacattctatgtgaatattataaagaaatcgccgggtaatttatagaatatttaaaaatttagtgaatattaaccaaatgaactggaatttttgtcatttctcataacaaaaagcccaaaatattttgggcttttgctgtgtttcactatcaaattaatcatcactgagtttatctttcgttttgccgacacccttttgcaggctgcctttcgctttgtcttttttaccttccgcttttaagtcggacttgtttgccatgtcgcctgctttgtcctttgcttcccctttcattttgttcatgccgccttttactttgtcttttaaaccgttatcttcactcatgatctcttcagctccttttttgttctgtgtacttgttttcttccctttcagcccgaacacaaacatgtaaactctcaattattgatttcacagcgttccccgtagcggagcactttgtaaacagccaatccgtctgacagcttattatccccgtattgcacgggcagaagagcaaagaaaacataataagttgaaaaatagacaaattggtaaaaaaataagtttggctcaaggacatcttttatgatcagcagatttattaaaaagatagaagcgagattaaacagacagcctccggaatagacgagcgcgctcgtcaggcggttatctatccgcaattcgccgaacttgcagaaagaatctatgaagtagatacgccgaacctgaatcggccctacttttaaaagacgtttccccattccgatatccaatgacgccttgcctccgaacagcatggccataaagctgtgtcccgacacatggatgacagacaccatcgggagaatgatgagaaatgaaacgaaaaactttatcatatcattaaatccgaacaacaaatcactccttcccatcgtacttttttccctcttttgcgatttttccgattttttctatgatcaaacgtcctgatgtgcataaaaaaataaccatctgctgatcagatggttaagaaaattatatatcgtataaacactgttctttttgaatgttttctctcatgcgaatcgctttttcataaaaatacgccgcttctttatattgctcatgtgcgcttgtgtaaacggcggcctccaaggcgaaatcttcaatatacacatacagcgatttttcattcatatagtcaaacacttcatgaattaaatccatattgagagactccaaataaagcgcttgtaaaaacttatacttctctaaactgaatcggtcgccgcgttctttcgcgatcatgatccctctttcataataggtaagggccgcttggtcatcatgcagcctgaaaagggtgtgcgttaagctgaacagcgccttcggaagctgttcaagctgatgctcttcaaaaacgggaaccgcttttctaaagtaccgggccgcttcatccagatcccgcttttcagaataacaattccccagattgtaaagcgaagacccgatcaggcggggctgtccttcaagcaaagaaaggcggagggcttcgtctaaatgctcaagcgctttgtcgtagtttttgcagtcgatgtagtttcctgagatgacgaaatggcattgaattctccgcactctgtaaaaatcgtgtttcatatacgtatccagcgcctgaatcccgtgattcatggaaaaatgagtctgcttcatgacgtaaaacacttcagacatcttgaaatggaattccgccctctctatatcatcctcgacaaatgaaaggagtttttccgctttccggtaaaaagaaatagccgcaacatagttattgtgatcgaattcatacattcctctgaacaaatggaaataatactcagacagtcctgatatactgtccgtgctttcgatcgtcttttgcagctcgctgtactgaatctgtgattgttcggtgcattccggcttgacgtaatcaagcataatatgatggcggtagctgatcagctgataatataacagcagcagctggtcttcctccatacgttgtatatcctcatcaatttcctctttcagctttatggcatcagccgcttgaaacgctaaaatgtgcttgtaccatttgttgatcttgactccaacttgagatgacggaatctcgtatgcggtcatgcccctttcacaaccttttctaatttctattggttatattttaacatattgtatggctttggaattgcataacttgattgtcctgcatcaaaattcctatcatatatttcggctgttaccggtattttttgaacagaccgctctcataatgtgaataaaaaagcctgcccttgtccgggcaagcttttcttcatccgcctatataagacatttccactttctttttcccatccgttttagaaagcgcgcggtcaattgaatactgatccgtgcgatttctccagacagaagcgatggattccgtcaattcatcatcggtcagaccgccgcgcacgagtttccgaacatcatagccgcttgacgcaaacaggcacgtaaacagctcgcctctcgccgacaggcgcgctctgttgcaggaggcgcagaatgcatccgatacggaggaaattacgccgatttcgccggaaccgtcaagatagcggaacctggaagcgacctctcctttataattcgcttctatcggctccgtcggcatgtgctggttgatcagatcaataatctcggccttcgtgatcacgtcttttttattccattgattcgtattgccgacatccataaattcaataaaccggagaatatgacccttttctttaaaatagcgggccatcggcaggatatctttttcattgacgcccttttgaacaaccatgttgattttcacaccgagtccggccgattttgccgcctcaatgccctcaagcaccttgttcaccgaaaccccgcggccgttaatggccttaaaccgctcatcctctaaagaatcgaggctgactgtcacgcgatgcagccccgcctgcttcagtttttccgcatacacgggaagcagagagccgtttgtcgtcatcgcgatatctttaagtccggggatgcgcgcaagttttttgatcaattcaggcatatcttttctcatgagcggctctccgcccgtcagcctgattttttcaacgccgaagcggccgacaaacagcttcgcaagccgctcaagctcctcgaaggagagcaattccgtcttttgtaaaaatggataatccggtccgaataattcggctggcatacagtacgtgcatctgaagttgcagcggtcggttacagagatacgaagatccctgagcggcctttcccttttgtctgtcacccggcgcgtttctgtattcataagcccaagacccctttctattgttcaacccgttcaggatgtgtgtatacgttaaatgatccgtttctgacaaaacctatcgcggttatgttcagctcttccgccatttgcagcgcgagctccgtcggcgccgattttgaaatgacaatcgacacgccgatttttgcggcttttaataaaacctctgaggaaatccggccgctgaagacgatcagcttgtcacggaccggcattccgtttttcaaacagcagccgtacagcttatccagcgcgttgtggcgcccgatgtccgtcctcatgaagagcagcttttccgtatcgcacagcgccgcattatggacgccgcccgtttcccggaaggtgccgctcccgctttgcatctccttcatcaggcgaaggcacgtctcaggagttatggtgatacggctgacggcggtttttgccgttttcacatcctgctgaaagtaaaaatggcggcctttcccgcagcatgaaccgatgactctcttcgtatagtctttttgctcaagcactccgggattcgtcagttcaacatatgcaaacccgagactttcatctatagtaaagcttttgatttctttttcaaaacgaatgacgccttctgatgcgagaaatccgatgacgagttcctctaaatggtcaggcgtgcagacgagcgtaacaaattcctgcccgttcaccatgacggtcagcggatactctgaaaccatccgatctgccgtctttgttaatacccctttttcatagcggtatatgtctcttaccgctgttgttttttcatccactgttttcccctccgcagtatccttctcttttattcttccacaatccctgtattttgtcgaatttgcggtttaaaaaaagagccctcttaggactctatgtttcattgcgatgatgtctgctcagaatggtgaataaaataactgcggcgataatggccaatatactgacgaatatgaaggcggcaagcttcagaaaaattcccatcagaacaaaaacgactgccgccagcactaatataatgcctgctccttttaacaacagcgttcatctccttttatccgtatcattcccgcggttccgttttctaaacaaaaaagacgccgcgcgggcgtccttttttaacctattcttttgctaaatcctttgcagcgtcttcccaagcctgtttgaactcgtccgcgctgtcagctgagacatatgtgccgcctccagcttccgccgctttttcaaggctttcgcttcctttcatgccgaagttgaagccgatgatattgacgatcgtgttgacgttcgctttacggagcttttgaatttcggcctgaggattacctccgcatgtttcttcaccgtctgtgatcagatatacgacgtttttccccgcggcgccggcccgctcaaattcttcacgcgtatcagaaagcgctttcgcaatcggtgtccagccggtcggtttaatcttgctgagtgattgctcaaatggagtcacggcgtacggctgaaggccgtataacgtttctgtcgcattacatgatacggctttgcctgagtttttattattgcccttatgcccgaatacccgaagcatcagattcgtgtcttcaggaagaacttccgcaaaagaagtgacagactctttcgcgacatctattttacgctctccccctgttttttgtatcatgcttccgcttgcatcaaacagcacagcaacgtttgtttcttcgtgctttttctcagctgcaaaaacaggtgatccgagtgaaagcgtcaaaagtccgacaatccccgcagtgaacatttttttcatttccttcattcctctccgtttgtttttggccgatgggcccccggctcttctctatgctagatgacgagtatgcaaaaagatatagggcgggattccttttgtataagcggctgtacgccgttaaaaatgaacagaattatgcgcatcatcctaaaaagattggataaatgatgacagatttaatgcctttttcgccctttttgtaatataagtccggaatctgatgctttttacagttttctcttcatcttttcttgaaatttttgttaaataaaaataaaaaaaagggccgataaacggcaccttttcttattccgctaatgaactcgctgccattgtaaagatgcggttcatatccttttggctgtgagcttcgtaatattttcctccgcccgctttggcaatctcgtgaagctggccgttgaagccttccttaaagtcaaagccgatcacgttaactttaatatgctgtttgcgaagttctttcgctgtcttaacaggatctcctccgcatgtctcctcgccgtccgtcaacaggaaaacggatttactgccaagtttgtgcaaaccggtaaaggaagccttcgcatcctttaatgcttttgcaatcggtgtccagcccgtaggcccgattccgttaagagagttaaggaagctctgtctgtcaaacctttggaatccatacacaccgcgaatggattcacaagattgaacctttccggagtttttattgttgccttccgaaccgaaaaccgtcattctgacctgtgatttagatttaatttgatccgcaaaacggacaatttcttcttttgccatgttgtatttagaaacaccgtcaatccgttttgccatactgccgctcgcatcaagtaaaatggcggtattgtttttaaatgaaagagtcttctcgtttgcattctcggcagcaaaagcaggagatgcagcagtcagcatcaatccgagcatgagtatgagtgaaaatgtttttttcattgctttttccccttttcaatagatttacgttcaacgccgaacaatatttatcgtaaatgagatgaaaagggaaataaataggacggcgttcctcattatttttgcgtatattcacatagaagcggcatttttatcagtgatttacacccggcgctcagccttcaatcgacatttgtcagcctttaggctttcgttatatgagtctgttggttgctttaccgtttatggaatagttttcaaaaaaacagacgctcatgaaagcgtctattttttcgccatatatttgtttaaaaatgaatctgcttcggaaatgtccactccctgataataatgcttgacgatgtccgccactgattttccctgctccgccatgtaattggccccgtactggctcatgccgacgccgtggccgaatccttttgtcgtaatggtgatgctgccgccgtttcgtttccattcaaagtcggcagaacggagtccgagtttttcccggatgtctcttcccttcagctttttgccgttgatgacggccgttgccacttgatggcccggcgttctggctgtaatctgtcccaccgtgttttgtcccgagagctgtacgccgagcttttgctgaaactccggcacactgaaggtctgggtggcgagatatttcggcgattgcttatcccacggacttttcacgctttttaaataaggaatggcgcttgtccaataggcttccgcattttctgtatacccgttgctcgtagagaagaaagatgcctcaatcggcttgttatcgtatgttaaaatctttccttgcgtgccggccaccgcgtttgtgattttcttgaggttgtgtgcgtacttagaaccccattcttttttcagctggcttttgctttgatagacttggaacatttgcgtatcatccaccagtgatcctttcggcgcctgaacggctgagtcagcgaccatcagtctgacgatgaatgtacgggcggcgagcgcctgggcttttaaggcctccggtttaaagtttgcgggcatttcggaagccacgacaccgatcacgtactcttcaagcggaatgttttctacagattgattggatgtccgataaaccggaatggatacaggtgattctttcaatgtttctgctccttttgtttctcgtgtggtgtgtgctgttttgtgtccgggctctctgtttacggctgctcctttttctgcctgaaacggaaggacgagaatggtggggacaagaagaataagtatacacagcccggatagtagaaatacaatcggtttcatatatcagctgcctcctgcttgggattcgactctacttcatcttatgggcagggacaagctaatatgacttccttttggacagaatctttattccatttttcacgcgaaaaacgtattcttttttggaaatcagagcataataatgatgataaaccataaaaaaacagtatgccagattgacatactgtttttacagccattatgcgtttaggtcagttacgacttctttgctttcttgttcagcggccgtttcatcaacgacacgctcgatatcagcgccgagagccgcaagtttttgatggaaattcacataaccgcgatccaagtgcttcagttccgtgacgcgtgtatgaccttcagccactaatcccgcaagaatcagcgccgcgcccgcacgcaggtccgtagcggcaacttctgcgccttgcagctgtacaggaccgttaataatcacagaacgtccttcaattttaatgtcgccattcatccggcggaattcttcagcatgcataaaacggttttcaaacacagtttcagtaatcatgcttgttccgctcgcacggagaagcagcgccatcatttgcgactgcatgtcagtcgggaatcctgggtgaggcatcgttttaatgtcgatcggcttcagctgggcaggaccgatgacacgaaggccttctccttcatccgtaattttgactcccatttcttccatcttcgcaattaaagacgtaagatgctcaggaaccgcacctttgactaatacatttccttccgtgatagccgcagccaccatgaaagtacccgcttcaatacggtcaggaatgatgttgtgtcttacgccgtgaagcttctcgacaccttcaattttaatggtgcctgtgccggctccgcggatttttccgcccatcgcattgatatagttcgctaagtcaacgatttcaggctcttttgccacgttttcaagcgttgttgttccttcagctaaagcagctgccataatcaagttttctgtcgcacccacacttgggaaatctaaatagatttttgcgccctgcagacggccttccacttctgcttcaataaagccgttgcctactttgatttttgcacccattgcttcaaagccttttaaatgctgatcaatcggtcttgagccgattgcacagccgcccggaagcgctactcttgaatgacccgtacgggctaacagagggcccataacaagcactgacgcgcgcattttgcgcacatattcaaaaggtgcttctgtttctaaagcgtaagaagcgtttacggtaacttcattattctcaaaatgcacatctgctcctaaatgacgcaacacttcattaattgtatatacatcggagagcgtaggtacatcacatattacgcttttttcttcacttgctaataaagatgcagcgataactggtaaaacggcattttttgctccttcaactttcactgtgccgtttaacttctgaccgccgcggacgatgattttttccaaggtattcccctccgcgtccctatattctctatattaatattcagtcgtcacgattggtgtgccaaccgtaacggtatgtttttcgcccattcccgcacttctaagcgcaacttgcacattcatcttatgtttcgatgtcatgatgtaatctgtccacttatatgtaaatgcagaaacagaaacgaaatgaggctcaactacatgttcaactggacttgcttcaaattctttcatgagctgttctgcttttttttgcaaaacaatactcatattatcatttaaatgaccctttagacaagtaaaaataaatactttattttgaaatatgtcatgtgcctgccgttcaaactgttcatatgtatcattccagttttccggttgctccgggctcatttgctcatataataaatacgaagttgggttctggtttttgagggtagtgacgagctgcagtttaaaagttgtgtgattttttttatcagaatacgtgccgacggcctttacgattttatcttcccgcgcagttttccagtgatattgcggatactgcgtcttcagttgttttaccttgtcatcaaattcactcagtgacaggttcagattttctttcgcatgaagcgtccattcatctacagtgacctgctgccgctccattccttcggcaatctgggcaagcggagacagctcacttgcatgaatggaatgaaataccgctattaaggcgcttaaaaaaacaaaaaataagatgatgcggcctgctctttttttcttcatatcgatctctcccccttactcccatttttgccggagccggggaaagcaatacatggaaaacttcgtcaaaactcgccaagcgggtgaagaaaagttggtttctcacccagcgattcccttcatttcaacagacgaaacatcctaaaataagtatggaagctgtttcgaataggtaagataatctaaaaagaagtcagcgactgccgtaccgatcgcaatggtaagaagaatgatcagcagcctcgcctgcactatttttccttttcggatcagcggatcaaagttgacggcctgaagcgcccaccatgtcaccgcaatgcataccaggtgaaccaggatgctgattgcggcctgctgccccaatacattcacaaattccatctcctttcattttttccgcccctcatatcctctcttattatataagaagaagagagaaagatgatcatttttacatcagaatttttatccaaaattaggggcaatccccgcttaaatgtccgttctccggcatgatatacttttttggaaaggagatgggaatatgaatcattccttttttcatccggaaaagcagtatggagaaacacttcccgtatttgaccacgagtgggaagcgatagcattctactatgattatagacagtctcaaacagaggaactgaaagaattatgtcagtttttcaacatttctcttgattattcacgcggcagcctgctggaagtggaagctctttacttccgcagcatacaagagctgcttttggcggattggaacctgccgattgacgaatttgagaaaatgctcagcgtgtatgtcatcgattgtgccatcagacaccatgacgatgccgaatgggtcgtcaaaccttatccgtatacggacggcgcttatacgacgggtgtgcggagaggaaacaaaacgtggcacaccgacaactgctgcgaacatttatatctgcaaaaagaagaggatcatccgcttatcggcgtctatgaatctcttatgcgttaatatagaaaaagaatccttctcagacagccgagaaggattcttttttagtttcctgcaacatccaatctgtttacagcccgctgtagcgcaagctcagcccgacgaatgtcagtatcatctgatcgtttgttcaaacggtcttccgcccgctttttcgcagcaagggcgcgctctttatcaatgctttccgctgtttcagcggcttgtgcaaggatagtgacctgatcaggacggacttctaaaaatccgccgctgacagccgccaattcggtctgtccgtcttttttaaggcggacagcgccgattttaagcggagccacggtcggaatatggccaggcaagataccgagatcaccgctctcggctcttacacttaccatttcaatatcagcatcatatactgggccgtcgggagtaacgatattgactttaacggtcttcatgcttttaccctcctaggaccagattaaacttctacacccatctcttttgcattctcaatgacttcttcaatgcgtcccacaagacggaatgcatcttccggaagatggtcatatttaccggaaaggatttctttaaagcctcgtaccgtttctttaacaggcacgtaagaacccttttgtcccgtaaactgctcagctacgtggaagttttgagaaaggaagaactggatacggcgtgcgcggtgaacgacaagcttgtcttcttcacctaattcgtccataccgagaatcgcgataatatcctgaagttctttgtaacgctgaagcgttgactggacttcacgcgccaccgcataatgctcttctccgacaatttccggagcaagcgcgcgggaagtggaagccagcggatcaaccgcagggtagatacccatttcagttaatttacgctcaaggttagtcgtcgcatccaagtgagcgaacgttgtcgccggagccgggtcagtgtagtcatcggcaggcacgtagatcgcctggatagatgtaactgaaccaacgtttgtagacgtaatacgctcttgaagctgacccatttctgtcgcaagcgtcggctgataaccaaccgcagaaggcatacggccgagaagcgcggaaacctctgaacccgcttgtgtgaaacggaaaatgttatcgataaagaacagtacgtcctgtccttgtttatcacggaaatgctcagccattgtaagacccgtcaatgctacacgcatacgtgcgcccggcggctcgttcatttgtccgaagaccatggctgttttcttgataacgcctgaatcgctcatttcgtagaaaaggtcgttcccttcacgagtacgctctcctacaccggcgaatacggaaataccgccgtgctcttgcgcgatgttgttgattaattcctggattaatacggttttacctacgccggcgccgccgaacaagccgattttaccgcccttgatgtaaggagcgagcaggtcaacaaccttaattcccgtttcaagaatttcaacctcagttgaaagctcatcgaatgaaggagctgatctgtggatcgggtccttttgagcatccgcaggcagcggttcatttaaatcaattttatctcccagtacgttaaatacgcgtccgagagtcacatcaccgacaggaacggaaattggcgcacctgtatcaacagcttccattccgcgctgaattccgtccgtagatgccatggcaattgtacggactgtatcatcgcctaaatgaagagcaacctctagcgttaggtcgatgcctacttcattttcgcctgtagctggctgtgaaactttaatcgcattataaatcgcaggcaagtggccgtcctcgaaacgtacgtcgacaaccggtccaagcacctgacttacgcgtcctttcttcatcgctatccctcctgacaaaatctttctattctaaagcggctgcaccgccgacaatttcggtaatttcttgtgtaatcgccgcttgacgcgcgcggttatatgaaagcgaaagtgaatcaatgagttctttcgcattatcagtcgcatttttcattgctgtcattctcgcagcgtgttcacttgctttactgtcaagaagcgcgccgtaaattaagctttccgcatattgaggaagcagcacttcgagcacctcttcttcatccggttcgaactcgtaagaagccgtgcgcttcccgccgctcgttccgaaatccgttaaaggcagcacttttttctccgtcacttcctgtgaaatcgcactgacgaaatggttatacaccaaatgcagttcatcaaaagcgccgtcgataaacatttgaaccgtctgacgggtcaaatctttaatctgagcaaaagtgacctcgtcgccaagccccactaactcagacaaaatcggcatttcccgttttttgaagaaatcgcggccgactctgccgattgcaatcaccgtgtattcatctttagactgatggcgttcttgaatggtgcggtaagcgtttcgcaaaaccgaactgttaaacgcacccgcaagcccgcggtcagacgtaatgacgagatacgccgtctttttcacttctcttgagacaagcatcgggtgtttcgcgtttttcgcaccttttccgacgttaaacacaacctcctggatcttatccatatacggagcaaatgactttgcgttggtttccgcacggttcagcttcgcagcggataccatctgcatggcttttgtaatctggcttgtttttttcgttgacgtgatccttgacttaatatcgcgtaatgaggccaaagatttcaccacctttattcttcatttgcgtaaaaagagagaaaaagagaacctttttctctcatcttctaagggttagttgcttggtgcaaatgtgcgtttgaagccttcgattgcagctttgaagtcttcatcagcaggaaggtttcctgttttcgcaatgccgtcaagcagatctttatggttttgatcaaggtacatgtagtactcttcttcaaaacgtctgatatccgcaaccggaatatcatcaagatatccttttgtcagcgcataaagaatggctacctgtttttcaaccggaagcggtttattcaagtcttgcttcagcacttcaactgtacgcgcaccgcggttcagtttcgcctgagtcgcctggtcaagatcagatccgaattgggcgaacgcttcaagttcacggtatgaagccaggtcaagacgcaatgttcccgctacctttttcatcgctttgatttgggctgatccgccgacacgggaaacggataatccggcattgatcgcaggacgcacgcctgagaagaataggtcagattgaaggaaaatctgtccgtcagtaatggaaatgacgtttgtcgggatataagcggagatatctcctgcttgtgtttcgacgaacggcagcgccgtaattgatcctgcaccttttgcgtcactcagcttggctgcgcgctcaagcagacgggagtgaagatagaatacatccccagggaatgcttcacggcccggcggacggcgaagaagcaatgacagctcacggtaagcggccgcttgtttggataaatcatcatatacgacgagaacgtgcttgccgttgtacatgaattcttcacccattgtcacccctgcatacggtgcaaggtacagaagcggagccggctgtgaagcggacgccgtcacgacaatcgtgtaatcaagcgcgccatgcttacgaagtgtttccactacgccgcgcactgtagattctttctggccgatcgctacgtacacacagatcatgtcttgatctttttggtttaagattgtatcaatcgcaacagatgttttacctgtctgacggtcaccgataatcagctcacgctgtccgcggccgatcggaattaacgcgtcgatcgctttgatacccgtttgaagcggctcatgtaccgatttacggtccattacgcctggagcctggctttcgatcggacgtgttttgcttgtcagaatcggacccagtccgtctaccggctgtccgagcgggttgacgatacgtccgattaattcttcacctacaggaacttccatgatgcggcccgttcttttgacctcatcaccttcacggatatctctgtaaggtcctaagataacgatacctacgttggattcttcaaggttttgagccatacccaaaacgccgtttgaaaactcaacaagttcaccggccatacaattgtcaaggccgtgcacacgcgcaataccgtctccgacttggatgactgtacctacgtcatgaacttcaatttcagattggtaattttgaatttgctgctttatcagcgtgctaatctcttcagctttgatgctcacttaggtttcaccccttctatcgatttcctccggcaagttgacgttccatgcgctcaagctttccgcttacgcttccgtcataaatccggtttccaatgcggactttaatgccgcctattaaatccgtctgcacttcatttctgattctgagcgaagcgattccggctttttttgcaaacacttgagacaatgataacatttccgcttctgacagcggttttactgaataaacaaccgcgtcctctgtctgacgggcctgattggcaagtttgataaactcgtctgtgagatcaggcacaatcgaagaccggcagcggtcaatcagaagaaaaatcgtatgcagcacagactcagacagtgcgccgaacgattgctgaatcagctcttttttcttagcggccgataccttcggatggcttaacacttcctgtaatccggcttcgttccgaaacacttcttttagtacggtaagctcttcttcgatttcattgatttgagaagtctcaacggcaatgtcgaaaagcgctgacgcgtatcgtttagagacagcagatccactcatcggctttctcctacctctttaagatagtcctgaatcagttgttcctgggcttgttcatcaagctctttttcaatcactttcgatgcgattaagacagaaagtgatgcgacttgctcgcgaagtgcggaaaccgcttgttctttttctttgacaatttcggttctcgccgcttctttcaatctttcagactcggcgcgtgcagcctggataatgtcttccttctgcttttcacccagttttttcgcattttcaatgagtgattgtgattcctgtttcgcttcttttaaaagaacgcgctgctcttcaatcagcttctgcgcttctttatttctttcttcagcggacgtaatttcgccggcgatatgatcttcacgctgtttcattatatttaatagcggtccaagagcgaatttcttgagaagcgctaataaaactagcatagctaacaattggaataggatatctccgccgttaaacgacagtcctaattcaagaggtaattgagacatctactacggcaactcccttctgcaggttttctctgctgataaaaagccgtttcgggacggcgtgcttatcagacataaagcaatggcgaaggttctcttagagtgatcttcgccatttttagttcatataaggcttttttgcttagccaaagaacgctaagaacgcgataacgacagcgataatcggaagggcctcaaccaatgcgatacccatgaacataagagttctaagttcttttcctgcttccggctgacgggcgattccctctaccgtacgtgaaacgatcagaccgttaccaatacctgcaccaagtgcacctaaaccgattgcaattgcagctgctattaaattcatgaaaaagttcctcctttaaaatgttatccgaatggatatatgattttaatgatcatgactgattttgtgtgacatgtacaccatcgtcagcatcgtaaagataaatgcctggatggtaccgatgaacaagctgaacgcctgccatgcaagcatcggaagaatggctccgactgtgccgaccaaaccgagaaagaagctgtttgagtagaaattcgtcgccagattcgcaagcaggccaagaagaatttccccggcgaaaatgttaccgtaaagacgaagtccgagtgtcagcgtattcgcaaactcctcaatgatcttcatcgggaacataagcggaaccggtctgaggtaatccttagagtattccttcaaacctttcatcttcacgccgtaatagtgcgttaacgacacaaccataacggctagagtcagagtaatagccggatcggccgtcggtgatttccaccaaagctcgtgtccgaccgttacagaaaacggcagccccagcatatttgatacaaatatgtacatcagcaaggttacaccaagcgccaagaagttagcccctgtttttaaatccattgtactgcctataatattgcggacaaaatcaacaatccattccatgaagttctgggcttttcccggacggatggacagcgttctcgtagtgagaatcgcaatcagcagcacaatcacacttgccacagtaatcatcagaatgtttgtcagattaaaagtaagaccaaacaaatcaatagttctgtaatcgtgattcaatgggttttcacctctcttccattgatgaacgtttgagctgaataatggaatctatcataatgacgggataaattgtcattaatccaataatcacacttgccacactgactttatcgggatatttaaaggcgacagccatcgcaagtatcgcattgcaccaacgcgctgcgctcccgagtgatcgtatggactttcctttcgccacggccttgtcaaaagcattcattcttctggtcaagagccacaaattaaacaaactgaaaacagttcccaaaaagaggcctaaaaaaacagttttatacgccgtaagaccatatcccagcaaatagattgctaagattacaaatacatatctccgttgtctgctgaatgtaagattgggatcgtccatcaactatctgtctcctgatgaaaatgtaatataattcctggatacggcaaaacatgcggttaaccctttgcagaaggcctttttttgtcccgcaaaacggcctgttcgaaaaaaccactcatcctcctgatgccacgggatgctgtttcattcgcttagataaatcctcatataacgggttttttggaggatttaaattgaggatggatactagaaatgaaaggaatgaaaaccttctcataataccctcgtttagcatacaatagcccctaacatgtgtcaatctgtttaaagttaaaaaactttttataccgaaagcatacacagaatgttcacaaattcacctataaatgtatgaactctgcccattcagcaaatatctggataaaaaaagaaaaccccctgaatgaggttttccgatttatttggttccgtacagtctgtcacccgcgtcaccgaggcccggaacgatatagcctttttcattcagtttttcatcaagggcggcgatataaatatcaacgtcagaatgatgtttcagcagctcttccacgccttctggagccgctacaagacacataaaacgaatgtttctcgcgccgcgctttttcaggctgtttatcgcttccaccgcagagcctcccgtagcaagcatcggatccacgacaataaattcgcgttcttctacatcagaaggaagcttgacatagtattccaccggttttaaggtttccggatcacggtataatccgacatgtcccactttagcggccgggattaatttcagcatgccgtcaaccattccgagacccgctctcaggatcggcacgataccgagtttcttccctgaaatcactttggatgtcgctatttgaacaggtgttttcacttccacttctttaagaggaagatcacgtgtaatttcaaacgccatcagtgatgcgacttcgtccacaaggtctctgaaatcctttgtgcctgtattttcattccgaatatatgtcagtttatgctggattaaaggatgatcaaatacgtaaacctttcccatactgtgttcagctccttttttgttgtccgagtgactttttcacacttctattgattctacagaaaaagacaaacagtttcaagaaaatcataaaaaaacccgccggattaaggttccggcgggtttcttccttattaatagtccagttctttatataaaggaaacttttcagtcagggcagatacgcgctgtctcgcttcttcaagttttgcttcgtcttcatgatgtttcagcgcgaggccgatgatggcgccgacttcttcaagcgcgtcaccgtcaaagccgcggcttgtcacagctgccgtaccgagacggattccgcttgtgacgaacggtttttccggatcgtaagggatcgcgtttttattagatgtaatgccgatttcatcaagaacgtgttcagcgacttttccggtcagtccgagagaacggaggtcgacaagcacaaggtggttatccgttccgcctgatacgagctgaatgccctctttgttcagagactcagccaggcgcttcgcgttcgagatgacgttttgcgcatatgttttgaaatcatcttcaagcacttctccgaaagaaacggctttggccgcgatgacatgcataagcggtccgccttggattcccgggaaaatggatttatcaatctttttgccgaactcttcacggcaaaggatcattcctccgcggggtccgcgaagtgttttgtgagtcgttgtcgttacaaagtcagcgtaaggaaccggattcggatgaagaccggctgcgacaagacccgcgatatgcgccatgtctaccatgaagtaagcgccgacttcatcagcgatttcgcggaattttttaaagtcgatcgtgcgggggtacgcgctcgctccggcaacgatcagtttcggcttatgcgccagcgctttttcacgcacatcttcataatctatatattgcgtgtctttatcgacaccgtattctacaaagttgtattgaacgccgctgaaattaaccgggcttccgtgtgttaagtggccgccgtgggagaggttcatcccgagcaccgtgtcgccgtgctctaaaatcgtgaagtaaacagccatgttcgcctgagcgcctgagtgcggctgaacgtttacatgctcagctccgaaaatctctttcgcgcggtcgcgggcgatgtcctcaacgacatcaacatgctcacagccgccgtagtagcgtttgccggggtagccttcagcatatttgtttgttaaaacagagccttgtgcttccattaccgcttccgtcacgaagttttcagaagcaattaattcgatcttagtctgttgacgcttacgctcatctttgatggcgttaaacacttgtttgtcttgtacaggtaaatgtttcatcagcgagatcctctcctatccgtttcctgttctttatttttaccacccttattgtacatggtttttcaggtgaatgtaacagcttatttaaaaaaatcacaaaatttaattagaaaacacgaacattatacaggaaaagcattttcatcattcgcattcataaacggcgcgaattccgcctatcagcttcggccttgtccgggccatcgtcacatgtgcttctccaagctcacggcttgatatccggacagggacggcaacgggtttcaaatgcatgccgatgaacgtatcgccgatgtcgatcccggcgtcagcctgaatcgattcggcgagcacgggagaacgcatctgccggtatgcataagaggccatcgctccgcccgctttcgggacggggacggctgaaacaatggggagtctgaaccgctcggccgtttccgcttcaatgacaagcgccctgtttaaatgctcgcagcattgaaaagcaagatgtacacccgttttttccttataccggttaagtccgccgtatatcaattcagcccaatccccgcttccggcggtgccgatccggcttccggcggcttcacttgtactgcacccgatcaccagcagactgccgtccgtcagtcctgcctgctcttgaaactcagtcagcatgtccgtccatttttgcttcatctcttccattgtccagcacctcttacagatttttttcttcgtaatctgcgattttgccgatccgccgttcgtggcggccgcccgtaaattcagtcgtcagccagacttttgcgatttcgcgcgccagccccgggccgatgacgcgttcgcccatcgccagaacattcgtgtcattgtgttcacgcgtcgcttttgcgctgaaggtgtcatgggcaagcgcacagcgtattccctttaccttatttgcggagatgctcatgccgatgcctgtgccgcaaattaaaattcccctgtcagcttcgccgttcaccactttttccgctaccggaaaagcgtagtctgaataatcgacagagccggcgccgcattcacagcccatatcaatgtattcaatctgcaattcatccaaaagactttttatttcttcgcggatatggacgccgccgtgatctgacgcaatagctactttcattcatttacctcctaggtgtggctgggcgaagacagcccagtgtgcttgtcctttttattacgaaatccgttgatttcattctactctttcacattcgttttgcaaatgacctgtttgcagattttctgacagattacttgctttttccgtcaagcaattgatcagccaaaagggtcagcagctcctccagttcgtcccgcgtctgtttataaacatcaagcggaccgccgaacgggtcagagatatcgccgttttcccccgttacgtattctttaatggtaaagactttgccctgactgttttgatatcggccttcaatcagctgtttgtgttgttccgtcatcgccagcaccagatcagccgtctcgatatgttcttccgataagggagatgaactgtgattgagagcgatccgtttttcaaacagcgcttctacggcatgggctgacgcttttccgttcggagacgcgaatacgccggccgaacttacgctgacgtccagccctttcgtttctgcaatggatttaaaaagagcctcagccataggactgcggcacgtattgcctgtacatacaaagattattttcatgtccgtcacctcttactgcctattataaatgaagaaaaaagaaacggcatcttcgtttctttttttacgtatcttatatcggtaaaagcagtttcaacccgaacccgatcaaaatggctccgccaagcgcttcgctgtaggagccgagccacgactgcacctttcttcccgccaaaaggcccgcccatgttaaaacggtgctgaaaaccccgaacagcgtaacggccagaaacggattggaaccgttcatcccgagactgagcccgacagaaaagctgtccagactgacaccgaccgcaaacagcaacagtcccgagcctgccggagatatgagcggcccgtctgattgtttaaacgcggcgatgatcatctgcacccctaaaatgaaaagaagagatccgccgatgtaaacggcgagcatccccagaaaaccggacagcagatgcccggccgccattcccgcaagcggcatcatgacatgaaacagcccgatgactacccctatatgaaaaatctgttttttcttcagctgaatcattcccattccgagcccgacggaaaaggcatccgtccccaaagcaaatgccatgatgcttaaggagacaatttccccgatgaatagattcgacatgaaataaaaacccccttggacgtgcccgcttgtttagcttatgcatgtccgataaggggtagaacaagttaatggataacggtgccgcctgcggctttcatcagcctgttcataatggcgagccccactccggtatccggaaaggactcagaaataatcatgtccacttccgcttcatcaaagctgcggagcgcatcgtataaggcggatgccactgtttcaaggtcggcgcgtctgccgcagaccttgatataatcagcctggtaactatcggcgttctcttctgttgtcaaaatgccgattcgttttccccggcttttatatacgtctgccagttcttgaattctccgggcgccgccgtcggcaatagccatcggcgcagaaggcgcgtaatgtgtatatttcataccgggagaaataggaacctcatcttcttcggtcagccctttatccacaagaaccggaccggcggcggattcaatctgctcttttgtcacgccgcccggacgaagcagcacgggctgtttccccgtacaggacagaacggttgattccactccgattcccgtcgcgccgccgtccacaataccggcaatgcggccgtttaaatcatgagctacatgctcggccttcgtcgggctcggttttcctgataaattggcgctcggcgcggcgatcggcagtccggccgagctgatgagggctaatgctaccggatgatcaggcattctgaccgctaccgtctcaagtcccgcggtgacacggggtgacagcacaccgggcttacacggcagaacaagggtcagcgcccccggccagaatagcttcatcagctttttcgccgtctcaggaatatggctgataaaacgatcaagctggctgatatgggatatatgcacaatcagcgggttatcgctcggccttcctttcgcctcatatattttcgttacggcttccgtattttcagcgttagcgcccagtccgtaaacggtttctgtcggaaaagccacaacctcattctgccggagcaattccgcggcttgtgtaatctggggatcggttgtggataattctgcggaacaatccacaaaccatcttcttgttttcatgtataaccaaactccttattttaaagcgataaaactttattttctctcgtgtattccttttgaaagtataaaagatgtcctttaataaaacaagtgttatccacaaactgtggacaacactttttaataagtggataaccttgtgtataagttagatcaggcagaggttttcaccattaaaaacgaaccttctgtgcataacgagttgcggaaatgttcggacgtatacagttcatcaggcgcatcggcgcacgcttcaaatcccatcacattcagaaactcagcagatgagggctgattggcgactaagtagacatcttgaatctcatgttttttgcacagcacatccatactttgaaacagtgtaacgatatggctttgattcagcctgtccgacatgacgagtgaacggagaagcccttttccgccgctgaatttttcgatcccgagacaggcggcaatctttttttcactgtcttccagcacgataaaacggctgatctgctgattgatttccgcatgtgccgtatcagcctttttcaaaaaggcctccagcgcctccgtatcttgatctcttgccactctcagctgataaaacatatatttccctccgtttcgatcaactctttcttccaatctatgaatcgaatccggatttatgccttttgcttcaggaaaatagatctgaaatccaatcgacgaggaaaaacttcacttcggtatcatcgtcatctttattttctttcttcgctttatcagcctttgcttttacgtcatccagcacttttttagtctgtttctgcgtttcttcctgcttctgtccgccgtcttcctgatctttcaccgcttcgccgtttgagaaatcaaggaagcacagcggcggaaacaagacgcaccaccagttggcgccctcgccattgccgagtgtaattaaaatcgcttcatattttccggccggatagaccatattgccgtagagctttgtcggaaacgagattttattgaattgaactgaaacggattgatgcgcacccttttctttcatcgtctgtttggcgatttctttaatttcaggaagcttcgaacgaatgagccgccgcgcttcttcaatggaagttatatctttcacccagtccgtgatttgcttgtttacagcatctctgatctggcgcttgagcttttgatcctcatcgttatcactgttggccaaaattctgagccggatcgcttcatccggtatgacgacgggctcatcggctgatgcccgcgccgtttcttcttttgtcaaacccgcaagcgctcctgataataaaagaaaaatatatatgcagatcatcattgtctgtttcatcggtccccaccgttcctctccgtgctttttttatctagtcccattatggacatgacgaaaaaggtttaaaccggcgggaagaaaaaaatctagcaagctgataatctgcattgacagattcaaaatatggtacgatattattttgataggaggttttcagatgaaatataattacaccgtgctgctgtcggcggcatgtatgtctgtcatttattctattttgtatgttcatcaattcattatcgcggctttcatttcgatggcgttttattttttgtttccttatttgatttttgcgctgccgcttcaatactttctgaataaaaagccgaagagatttcatccgctgtattttctttattatttaggggtgtcattcattgcaaacgggatcatcttcggtcttttgcagccgtcaggccaatctctgttttctaattcagccttttatatctttgcggttttaacagccgtcgtctattgggtatgggattccgtattgctgcaaagacaaaatccggctacagaagcgtaatcagcagacagccggctgaagggagtgcggcgcaaaagaaaacggcggccatctttaaacgggcgtgccgtccttcttctgtttcagaatgataattggcccgctgctccgctccgcttacggccaacccggaaacgatgatcgctgtgacgataagaacagccgtaacggcgccgaaaatgatgtcaacgccaaacggcagaacaacccccgccgcataagctgcggcggcgagtatacatccgaaggcgaacgcttttttcaaggcggatgcccctttcattttctttccattgtaacaaaagcccgccgtgtgcgtcaccggcgggcttttttcatgatgtgatgaccgcggatacggttctgtcttttccgttgatgtcctgtacgacttccacttccgcattcggaaaggaatgacggaacaggtctttcacggctttcccctgattatatccgatttcaaagacgacaagcgctttatctttcatgacaagaggcagctcctccataaaccgcttgtagaatttcaaaccgtcaccgccgtccgtaagagcatgaagcggctcatggaaacggacgatatccgacaaatcggccatttcttcttcagaaatatacggcggattggaaacaataatatccgctttttttcctgatgaaataaaaggagttaacagatctccctgcaaaaaacagacgtccgctccgaggttttgcgcatttctttccgccacctgcagcgcttcttttgaaatatccgaagccgatactgaaaaatgtccgcattcaagggcgagcgtcaccgcaatggctccgctccccgtaccgatatcaatgacgttcaggcgttctgcctcggaaaatacccgcttttgtctgtccagcagatgaaagacgacttcttccgtttccggacgcggaatgagaacatcgtcattcacaaaaaattccctgccgtaaaactgttctttcccgataatatattgaatcggaataccttctttatgcatctccacgtgccgcctgaatcgataaagctcgtcctcgccgacgggctcctgcagacttgcgagaagcttgctccgatccattccggtatcattcaacagcagcagctcggccgcgtttttttctcttcccgcttcggttaaataagaagaagcccagcttagggcttcaaaaacggtcttcatcttaattttccgcctgctggagcttgcttgactggtcttctacgattaacgcttcaaccacttcatcaagcttgccttccaggatttgatccagcttttgaatcgtcaggccgatgcggtgatccgtcacacggttttgcgggaaattgtatgtgcggatacgctcggaacggtcgcctgaaccgacggctgatttacgggtctgatcatattcagcctgagcttcctgctggaatttgtcatagattctggcgcggagcaccttcatcgctttttctttgtttttaatctgagatttttcatcctgacaggaaacgacgacaccggtcggtaaatgcgtcaggcgtacggccgacatcgtcgtgtttacgctttgtccgcccggtccgcttgatgcgaatgtatcgacgcggatgtctttttcgtggatgtccacttctacttcttccgcttcaggaagacacgccaccgtcgccgtggatgtatgaatacggccgcctgattccgtttccggaacacgctgtacgcggtgcgcgccattttcatacttcagcttggagtatgcgccttttcccgtaatcataaagatgatttctttgtaaccgcccgttccggtcacgtttgcttccatgacttcagtcttccagccttgaatttcggcgtaacgggagtacattctgtagagatttcccgcaaacagcgcggcttcttctcctcccgctgctccgcggatctccatgattacgtttttgtcatcgttcgggtctttcgggatgaggagcactttcaaacgctctgataaggtttccgtctctccctgcagttcggagatttcttccttcaccatttctctcatatcggcatcaagcttttcctcaagcatcgctttcgcatcggcaagctgttctgatgcgtctctgtattgtctatagacttcaacggtttcttgtatatcagattgctctttcgaatattctctaagctttttcggatcgttgaccacttccggatcacttaaaagctcatttaatttttcgtatcgttgttcaattgactgtaaacggtctaacacggtcttcacctctgttttcctgtgcgtaacattctcattatagtatagggcttatcgccagtcaaaagcaattcgcctctgttatactgaagcaaaaaaggaggggcggatatgctgaaatccatccaccatatagcaatcatatgctctgattatgaaaagtcgaaagctttttacaccgagattctcggcttcggcattataaaagaaacataccgaaaggaacgggaatcttataaacttgatcttgcgctggacggcgcgtacgcgattgaattgttttcctttcccgatccgcccgaacggccgaccagaccggaagccgcgggtctccggcatctcgccttcaccgtaaacgatcttgaagcagccgtcagagagttaaaggaaaagggcgtcggcacagaaccgatcagaaccgatccgctgacggggaaacggtttacctttttcttcgatcccgacaagcttccgcttgaattgtatgaagcgtaacgttttttgaagaaatgccgctttctttggcgaattccttcttgttttgtctaacatgaagggaacgccgcctcatggtcgaatacctagcaaaaaggaggtatgtgatcatgaatacaaacatggccgcgaaagagctcggcgtctccgcaaaaacggtgcaaaggtgggtcaagcagctgaatcttccggctgaacggaatgagctcggacattattcctttacacctgaggatcttgatgtgctgaaatcggtcaaacggcaaatttctgaaggcactgcccttctggacgttcaagtgccccggcagccgaaaaaacggacgggcttcattttgcagcgtccgaaaatcaatggcggcgctgaacaaagattggcagagctggagcgcaaactggacattctcacgaaagagaaacaaggtgagaaccatctgctttcaaggatagaagagcttgaacgccagctgaaacaaaaggcggatgaaggggtgtcttatcagcttcttcagcacaggcgggaaattgacgacctcaataccgaattgcagacattggcctcccgcatccaggaacttgcccagacagctcccctctcagaaacagccgcttcttcagaacataagaaacccagaaaaaaaacgagattttcgccctttaaatttcaattctaatcaaaaaagctccctgaaacagggagcttttcattatgcagtcagcgcaatgatgatcggcagtgagatgagagataaaatcgcactgatcacgaacgcggacgcagtttcttcctcttgtttttcgaaacgtgtggcaatcatcgccgctaccgcagatccagggaatgcaacgagcaataccgctttagtgatctggtcagccggaagtccgactgcaagagcgatcaagtacatcagcgcaggctgaacggcaacttttaacaaagcgataccgaaagccggcagactgagcttaatgttgcggataccgacagttacaccgacggcgaagagcgcaacacctgatgttgtgcttccgagctgatcaagcattttttctcccaagccagggagtgttacaccgcagagtaccaaaatgatactgataagcggtgcagccgcaagcggttcggaaagaccgtgaagaatagacttaccagtcattttccagaagttctcgttttcagtgtcttttttcttagatgactcaccgacagtagcaataatgatcgcaagcgggtcaaggatggcgttaaccacgatacccgtaacggcgataggaatcgctacttcgcttgctccgaataagcttccgagtacgggaatacccataaaagcaaatgtcggctgtgcagagtttaaagaaaatacagatgaattcgttaaatcatacttgaagataaatttgcaaaccaacaaaatgacgataaagaatccgacaatcccaatgatcaaagcgaccatcaaaggaacctgtgataaaaacgcacttcttgaagtggttaaaatactagcgataaaatgcgccggaagcgcgtacttcgtaactaaggtgcttaccccttttgctgacttcgcgtcataacttccgaagcgacctgcgaaccatcccagcacgatcacgaaaaagatcggcgccaggaggattaaaatatctaagaagctcaaaatgttctcctccaaatccttaatgtccgtatactttagcctttatataaaagctttccctcggactgtaaaattaatcgtaaaaattatttagcgacaacttgtttatattgcggtttccacattgcatcaagaacggcttgttctacattttcaggaatgcggtttgccacgccttctttaatggcagtttccgctacggcgatcgcaactttaattgaaacttcttgtaagtcgctcatgctcggcagaaggcctgcacccggtgtttcaaaatcaacgctttctgcgattgcgtcagcggttgccgcaaacattgcaggagtaatcactttcgcttctacaacgattgaaccgagaccaagtccagggaacgcgaatgcgttgttagattgtccgatttcatgagaaacgccattgtactctacattgtcaaacgggcttcctgtcgccacaagcactttgccgtcagtccatttgaaaagatcgctaggaacggcttcagcaagcggtgtcgggttagacatcggcatgatgaccggacgctcaacgtgttttgccatttctttgacgatttcttcactgaacgcgccgctttggcctgatgtaccgattaagattgtcggtttcgcttgacggatcacttcaatgaaaggaatttgtccattttcatcgcgtttccaatctttaatttcttcagctgtgcgcaggtacggctcttggaaatcaagaatgttttccataccttcaattaacaagcctctgtagtccattgtgtagaacgctttgttggcttcttcttcagaaagaccggcaagcaccatagtgtcgcggatttggtcagcgattccgattccggcagatcccgcaccgaagacaaccacacgctggtctttaatagacgcgcctgttttcttcatagccgcaagcacacctgcaagcgtaatcgcgcctgttccttgaatgtcatcgttgaatgtaagaatttcatggttgtatttcttcatgatattgcgcgcgtttttgtttccaaggtcttcccagtgaagaagagctttagggaaatatttaagcgcagcttttacataagcgtcaacgaaagcttcgtaacgttcgccttggatacgttcatggcggttaccgatgtataaaggatcgttcagaagtttttcattgttcgtaccgacgtcaagaacgacaggaataacacggcttgggtcaataccggcagcagctgtgtataccgctaatttaccgatggcgatgttgataccgcccacaccccagtcaccgattccgaggatgctttctgagtctgtcgcaacgatcagatcaatatctccggcagtggcatgaaggttttcaaatgcctcttcgattccttccacgttgtcgatagaaaggtaaatcccttgaggtcttctgtactcatggctgtattcttgaatcgcttcaccgacagtcggtgtgtaaacaaccggcagcatttcacgaagatggttttgaagcaatttaaagaaaagaacttcgttacggttttgcaaatcattcaaatacacgttttggcgaaggcggtccggctgagcttgaaactgctcgtatgcgcgttttgcctgctcatcaagagacagaattgtcggaggaagcagcccgtctaatccaaggctttttctttcttctgctgaaaacgcaacacctttatttaaagtagggatagatagaacttcttttcctcttaaagtagtttctaagttgccttccttcgttactttaatattattcaagaaaatctccttctttcttcaaatagttaacaaagttaagtaattacccattttggctagtgtgatcgcgatctgctatatctttttttgacaattattcgaacaatgtctcataactatttacattacttagtcattttatgcctgtaaaaatgaaaattcaagagatgaaaattacttaattttttcatactcttttttaagttatttaactacaatttttgaaaaaacgtcaaaaaaacaccggattttttaccgatgttttcatgaaaagggttatttatcagtctgtttttttcggcacttcgtgatgatgtctgcatctcgcttcgtatgactccgacgcgccgactaaaatgaccggatcatcataggaagcgggcttcccgtcaatcaaacgctgcgtacggcttgccggcgacccgcaaacggagcagaccgcctgcagcttcgtcaccgattcggcaaccgccatcagattcggcaccacgccgaaaggctctccccggaaatccatatcaagtccggcagcgatgacacgatagcctttatccgcaagcgaggataagtcgccgatgatcgattcgccgaaaaactgcacctcatctaccgcgatgacgtccgtgctttcactgatatgatcccatatttcagccgaagacgagatgacgtggcttgtcatggatgtgccgttgtgagaaacgacggcctcctcactgtagcgattatcaatggcaggtttgaacaccttgacctcctgcttcgcatatgtcgctcttttcactctgcggatcagctcttctgatttcccagagaacatgctgccgcatatcagctcaagccatccgctttgcttcattatgtacataggctatccgctcccctttttttcctgtttatggacataaaaaacaggcaagaagcaattcttgcctgcctgtaaaatctattattacttaagaccgtattttttgttaaagcgatcaacacgaccatcagcagaagcgaatttttgacgtccagtgtagaatgggtggcattcagagcaaatctcaacgcgtacctcttcttttactgagcctgtttcaaattcatttccgcaagcgcatttaactgttgcttttttgaaattaggatgaattcctgctttcattgtatccatctccttccgccctgaatcccgtgtggaaacagagttattattccggagtaatccggaacgcatatgagagaattatatcagtcatttactgcatttgcaaatacattttttatcagcggcgggctgatgatgaaaggtttgcctgcttccattcttggttgatcagatcgaagaattcctgattcgtttttgtttttttcatttttctcataaacttctctgcgaagtccggagaatcagacatcgatttgcggatcgcccatagacggtcaagatgctctttcggcacgagcagctcttccttccgggtgccggagcgtcggatatcgatcgccgggaaaatccgtctttccgcaagagaacggtcaaggtgaagctccatgttgcccgttcctttaaactcttcatagatgacgtcatccatccgggagcccgtgtctacgagcgccgtcgccaaaatggtcaggctgccgccctcttcaatgtttctcgcggcaccgaaaaagcgcttcggacgatggaacgcagccgggtcaatccccccggaaagcgtacgtccgcttggcgggataacgaggttgtaggcccgtgccaggcgggtaatgctgtccatcagaatgataacatcttttttgtgttcaacgagacgcattgcccgttcaagcacaagctccgctaccttaatgtgattttccggcacttcatcgaacgtcgagctgacgacatcgcccgctacggaacgttcaatatccgttacttcttccggtctttcatcaattaagagaacgatcaattcagcgtcaggctgatttgtcgtaatgctgttagcgatttcttttaacagcatggttttaccggctttcggcggcgccacgatcagaccgcgctggccgaaaccgacgggagccatcatatcaagaattcttgttgagagataattcggtttcgtctcaagcaccatttggcggtccggataaagcggagtcagcgcaggaaaatggacgcgctctttcgcagattccggatcatctccatttaccgcttcaacgtgcaaaagtccgtaatagcgttcgttttctttcggcggacgcaccttgccggatactttgtcaccgtttcttaaatcaaagcggcggatctgggaagcagaaatgtagatgtcttctgagcttggcgagtaattaatcggtctgaggaagccgaatccttccgattggatgatttcgagcacgccttccataaacagaagatcctcctgctcggcgttggctttcagaatggcaaagattaattcttttttagtcagtttgctgtagtaggagattttataatgtctggccagttcatatagttcttttaatttcatattttccaaagaggaaatagatacgtctttcataaaaacaccacgcttttcatagtcaatgtattgctgttttcattcaaatcggctgcttcgcatgattccgccaaagcacattcttttataaaacgttcaggaacttctatcggtaacacttccacccatgatcggcgcttttttaaaaaaggaatgtcttaatgagttttgaaggaagcgaggacaaaaacttgagaagatcaatatttatatcgtctgtatgcggtagaatttgaaaatttcccagtactcaaaagaaggaatgacacagaaaaatcgcagcactctttatttttacctcatttcaaaaaattattcaacttaaataatgctttgacatataaatgatagggttgactctttattgcaaaagaaaagcgggactttccgtcccgcttttctctatttatggccggatcacaagatttggttttttcttcaggctgtgtcttccgtcaacgaatcggaccgttcctgatttcgcccggatgaccagactttcagtcgtgccgacggagcctttgaactgaacgcctttcagcagctctccgtccgtgacgcccgttgcggcaaaaatggcgtcatcccctctcacaaggtcctccatccggagcactttggatacatcaaggcccattcgctcacagcgggcctgctcttccgcactttgcggcagaagcctgccgatgatttcgccgccgagcgcttttaacgcaacggcagacagcacgccttcaggagccccgcctgaaccgaagagaatgtctactcccgtatggtcaaaggccgtattgatggcgcccgcgacatcaccgtcgttgatcagtttgattctggcgcccgcctcacgcaattcagagatgattttttcatgtctgtcacgatttaaaatggttgccacgacatcttcaatgtctttgtttttcgctttcgcaacggcttttaagttatcaatgacaggcgcttcaatatcgatgcagcctaccgcttcgggaccgaccgcgattttttccatatacatatccggggcgttcagcagtgttccgtggtcggcgaccgcgatcaccgtcagcgcattccagccgccgctcgctacgatgtttgtgccttcaagaggatcgacggcgacatcgacgcgcgggccgtatccgtttccgagcttttcgccgatgtaaagcatcggcgcttcatccatctcgccttccccgatcacgaccgtgcctttcatcggcaccgtgtcaaacacgtcacgcattgcgcttgtcgccgcatcatcagcttcatcttttttcccgcggcccatccatctggcagatgctaaagccgccgcttcagtgactcgaaccaattccatcgataagcttctttccatttcaacacgatctcctctcaaaagtccgcatttctatgaattttggagctgttctatctcttcgtccgtcagcctttgccgccagattgtggcgcccagaccttcgagttttttctcaagattgctgtagccgcggtctaaatgctcgagaccggtaatttcggttacgccgtcagccatgagcccggcgacgaccagacaagcgcctgcacgcagatcgctcgcctttacttttgcgccctgaagctcggccggaccggtgataatggccgacctgccttccactttcatgttggcccccatccgtctcagctcatctatatgtttaaatcgggccgagtagatggtgtcggttacgacgctcgtgccgctggctctcgttaacagagatgtcatcggctgctgaagatcagtcgggaatcccgggtaaacaagcgtttttacgtcgaccggttttatctgcttctgcccgccgagcataagaagctgatcgtcactcgtctcaatgtgaaaacccatttccctgagcttcgccgttaaagactccaggtgagtcggtatgacattatcaataatgacttctttccccatcgcggcgccggcgatcataaaggtgcccgcctcaattctgtccggaatgatcgtatgcctgcatccgtgcagctcttttacgccgtcgattctgattacattggttcccgcgcctttgatctttgcgcccatgctggtgagcaatgtggcaacatcaataatctcaggttccttggcggcgttttctatcacggttttaccttcagccagtacagcggcaagcatgatattgatcgtcgctccgacgctgacgacatctaaataaatccgtgcgcctctcagcctctcggcgcgcagataaatcgcgccttgttcattggtgacttccgccccaagcgcttcaaaccctttgatgtgctggtcaatcggccgcggcccgagatggcatccgcccggcagtccgatgaccgcctgtttgaagcggcccagcatcgcgcccattaagtaataggaagcgcggagttttttcactttgccgttgggaagcggcatgctgatcatcggggaagggtcgacgaccatttctcctttttcaaaatggacgtttccgccgatttctttcagcaggtcacgcagcgtttcaatatctgagatctccggaagcccttcgatcgttacttcggaatttgccagaatggttgcgggtatcaatgcgacggcgctgtttttcgcgccgctgatatgtacggttccgtttaacggatcgccgccggcaatattcaacttttccatgatagtctccttccataagaagatagctgcggagcgtaaataaaatggcattttattctgtctctgcaaataaagctcttgtccaaaatgtagccaattcgaagagaaagaatacaaggacattataaaataacaggaagaaaatagcgaagctttgcggggcatttttaacacaggatgcacagaggcccgccgggttcacattccggggaaacacactcttcactttgatactgaaggcccgctgccaaacaggaaaacataagggtgcggcaaacggatgcaaccggtttgccgcccttttcacccttatttattccagtctgccaagaattgctcgatgcctttatccgttaacggatgtttcgccagctggtgaatgactttcagcggcatcgtaccgatatgcgcaccgcgtaaagcggcttcagtcacgtgctgcgcatgacggatggaagctgcgatgatttgtgtatcaatatcatgaatgtcaaaaatctgtcttatttctgaaatcagttcaagaccgttatggccgatatcatccagacggcctaagaacggagatacataagtcgctccggctcttgccgccaaaagcgcctggttggcactgaagatgagcgttacgtttgttttaatgttcagatcgctcagcgcttttacggcttttaacccttcagacgtcatcgggattttcaccgtgatattcggtgcgattttcgcaagttctttaccttcttcaatcatctcttcagcattcagggaaatgacttccgcacttactgatccgctcacgacttccgtaatctcacgaagtctgtcatggaaagacacgtcagcttcttttgccactaaactagggtttgtcgtaactccggcaagaacgccaagttcataagcttctttaatctcgtcaatgtttgctgtatcaatgaaaaataacataaggaaagcctccccagtaataaattttcagaactgtaaaacatgattgcgctttctaaaggtaagacataaaaccgcctgtcaatgctgtcaggcggtttatggatgttacattggattaagcttggtttgaagaaccgaactcacgcattttgccgataaccgtttctttgatcgcttcacgagcaggtccaagatatttacgaggatcgtattcgttcggcttagctgccaatgtttcgcggacagcttttgcagaagaaatttggttttcagtgtttacgttgattttagccgtaccaagtgagattgattttttaatgtcggcagtcggaattcctgtaccgccgtgaagtactaacggaaggccggttgatttgccgatatcttccatttctttgaaaccgaggttcggttcgcctttgtaagggccgtgaacagaacccagtgcaggtgcaaggcagtcgatgccagtgcgctctacaagttcttgacactctttagggtcagcatagattacgccttcagcgatcacgtcatcttcctgtccgcctacagttccaagctcagcttcaactgaaacgccgtggaaatgagcaagctcaaccactttagctgtagttgctacgttttcctcaaacgggtggtgagatgcgtcgatcattacagaagtgaagcctgcatgaatcgctttcgcacaagattcaaagcttgaaccgtggtctaagtgaatggcgacaggaactgtcactttgtattcttccataagagctttaaccatggcaaccactgttttgaagccgcccatgtagcgtcccgcgccttctgaaacaccaagaataaccggggatttttcctcttctgctgcttgtaaaatagcttgagtgaactcaaggttatttaagttaaattgtccaacagcatatcctttttctttagctgtattcaacatttccgtcattgaaactaaaggcatgtcgaaagtcctccttatgtagcctgatttgcttcttctcgaaaaaagctttccacctatagcatgaccataaaaacctgtcatatgtaaaacaacagatcgctttttctccatctctaggataccaacttttcgacaaatcggcaacacaatgacataattgtttctaattttattaattcgattttagaggtaaatattttttcaccgcgtctctgatctcatcaatgtcaaaaggtttcgcaaaatgggtcagcgctccgagctcttttgattccttaatcatatcgagttctccgtaagcggtcatgataatgacgcgtattgattcgtcgatcatcttcatgcgcttgagaatttcgattccgtccatgccggggattttcatatctaaaagcacgagatcgggccgttctttcgttacgatgtccagcgcctgtatgccgttggcggcctgaaacgtctggtacccttctttatgaaacacttcattgagcaatatgcgtataccgtattggtcatctacgattaaaatcttttcattcatcattttacaccccaatattatcattttcgtcaaaaggaagcagttgtttatgtattctgtttgattttcacatttcctttaattataatagtttactttccgacattttctgagcattttctcttttgttgtatactgttcttgtatgtgtaaaggaggtttcactcatgttaaagatatttacgacgcagcttgcaggcattttttcccgcattcaggataaggaatccgaagcaatagaagacggcgcgcgcctgctggcgcaggcagccgtcagcggccataccatttatttatacggcgcaaatgagatgcagggcattttgtgcgaagcggaactcggctcagaaccgatgccttccgtcaaagcgtttccggatacagctgattcgattacagaaagcgacagggtgctgatgttttgttcaggtccgggcacggctgaagaacaggcgctggctcaaaagctttatgaaaaagggatcggcctcgttggcgtatctcctgtcatcaaagatcaaaccgggattgaggaattttgtgatgttcatattgacagcaaattaaaaatgccgcttctgcctgatgaagacgggacaagatacggctttccttcattaatgacaggcctgtatgtctatcacgcactgtcctttacgttaaaggaaatgatgcaggaatatgcctgatgcagaaaaaagacttgccgcttttaaaggaggcaagtctttttttattacttctgttctgcagcttgtacggaagcgccgataaagtctttgaataaaggctgaggtcttgtcggtcttgatttgaactcagggtggaactggcaagcgacataccaaggatggtctttcagctcgatgatttccacaagacggccgtcagggcttgtgcctgagaacacaaaaccgttctcttccatttgctgtctgtattcgttgttgaattcataacggtggcggtggcgttcgtataccacttcatccgcatacgcttcgaaggctttcgtgtcttcctgaagcttacaagggtacagtccgagacgaagcgttcctccgagatcctcgacatctttttgttctggcagaaggtcgatgatcggataaggagtggacggatcgatctccgcagagtgagccccttccagacctaatacgtttcgcgcatattcaatggatgcaatctgcataccgaggcagatgccgaagaacggaattttattctcacgcgcatacttggcggcgatgattttcccttctacgccgcggtctccgaaaccgccgggcacgatgattccgtctgtgccgccagtcagttcttgaatattgctttctgtcacttcttcggcgttaatccatttgatcttcacatcagcgtcaaacgcatagccggcgtggcgcagtgattcaacgactgaaatgtaagcgtcttgaagctcgacgtatttaccgacgaggctgattgtaatggttttagacaagtttttcactttcgtgacaaggtctttccattccgtcatatccgggtctttgcattctaatttcatatgatcgcagacaagcttatcgagtccctgctcctgaaggttaagcgggatggagtaaaggttgtccgcatcttcgcactcgatgaccgctttcgtgtcaatatcgcagaagagcgcgattttatctttcatatcttgagaaatcggcatttctgtgcgcacgacgatgatattaggctgaataccgaggcttctcagctcttttacgctgtgctgcgtcggttttgttttcagctcgcccgccgctttgatgtacggaacaagcgtacagtgaatgtacatcacgttttcatggccgatgtcgcttttcatttgacggatggcttcaaggaacggaagggattcgatgtctcccactgttccgccgatctcagtaatcactacatctgcgtttgtttctttgcctgcacggtacacgcggtctttcagttcatttgtgatgtgcggaatgacctgaaccgttccgccgaggtagtccccgcggcgctcttttttcaatacggcagaatagattttaccggtcgtcacgttgctgaatctgttcagattaatgtcaatgaaacgctcataatgccctaagtcaaggtcagtctcagcgccgtcatcggtaacgaatacctcaccgtgctggtacgggctcatcgttcccgggtcaacgttgatataagggtcaaatttttggatggtgacgctcatgcctctgtttttcaaaaggcggccaagtgacgcagccacaattccttttccgagtgatgatacaactcccccggttacaaaaatatatttcgtcatttcgtttgctcctctcttcggtctgcgctacattccttaaaatgtgccgttttatagaaaatcatttcactaaaaacaaatgatgtgtaaaagaatttgggagatgaaaataagaaagctccctttcaatttcttgaaagggagcgtagcactcttatgaattctcttctttttgaagagcccaaaatacatactacatagttcgacaatgaaagtcaagatcgttttgctgatataaaatcagtctttgcgatcctcttcctcatcatcataatcttcctcatcttcttcaatcatctcgtcttcgatctcaagctcgtcgtcatcttcttcatcgatatcttcgtcgtcaaagctgtctgcgtcaaggtcaatatcttcttccatttcatcgagatcgatgtcatcttcgtcaacttcctcgaattcatcaaggtcgagatcttcctcaacgacttttttcgcttttttctttttcgcttttacagtcggctgtgtttcttcgtccagctgatcgtacggataccagctgcgaagcccccacgtctggtctgacagagcaataaagcggccgtcaatgttcaggtctgtataaaattgggcgatacggtcgcccagttcctctttcgtaacaccgagcaaggagatcatttcattcagcagctcctggaacggaaccggttttttatgttctgagaaaatttcgtgagcgatttcaactaaagccatctgcttcagctgttcctgagaatattgtttgatactcaaggtcggacactccctttctattacttatatgtatctgtttctatcctataataagaacgaatttgtattgttttgttcataaaccatacctctcattataaacaaattaaaacagaatatgctacccttaacagcgtaatttaagaaattttagagctgtcccttcataaatcggctgatgtgcgaaaacaaagccgccggcatatgcgccggcggcccgcttctttctataaagactcttgtttttcagcgccgaatacagacatggcgagcaattcactgacatcataagtgccgacagcgtcttcggcttctttcgctttcgtaccgtcaccgagcatggtcagacagtaaggacagccggagctgatgaccgtcggactgacagaaagcgcctgctcagtccgggccgtgttgattctcgctcccgtttcttcttccatccacatgagccctcccccggcgccgcagcacatcccgttttcgcggctgcgctccatttccttcaattgaacgcccggaatggcttttaagatcgctctcggcggctcatacacttcattgtatcttcctaaatagcacgagtcatggaaggtaatcgtttcattcaccgggtgaagcggttttagtttcccctgtgacacaagctcggctaataattcagtatgatgatagacttcggcccggaatccgaaatcaggatattcatttttaaacatattataggcgtgcggatcaatcgtgacgatttttttgattccgtgtttttcaaattcgccgatgttgtgttccgccagctcttgaaacagaaactcgttgcccaaacggcgcggcgtatcgcctgagtttttttccttattgccgagaatcgcaaaggatacgcccgcttcattaagcagctttgcaaatgagacggcaatcttttggctcctgttatcgtaggaacccattgagcctacccaaaacaaatagtcgaactctttgtcttgttttttcatttctttcactgtcggaatctctgtatcagcctgctcccgccagttctcccgctctttccggtttaagccccacgggtttccctgtctttcaatgctagtcatggcccgctgcgcgtcgctgtccatcttcccttccgtaagcacaagatagcggcgcagatcgataattttatcaacgtgttcattcatgaccggacattgatcttcacagttgcggcaagtggtgcacgcccaaatctcctcttccgtgatgacctcgccgattaagctcgggttgtaatcaatggctgcggccgcttcacgcgatcctccccctgaggaagccgcggcgagctgattcgctttcgtgtgctgaaaaacgggcgcgggcacccacggagattttgacgtcacggcagcgcctttttccgtcaaatggtctctgagctttaaaatgaggtccatcggcgagagcatcttgcccgtaccggaggccggacacatatttgtacagcggccgcattcgacgcaggcgtaaaggtcgacaagctgagagcggcggaagtcttcaatctttccgacgccgtagctttctttcgtctcatcggtgaaatcgattttttccagctttccttttgaatccagcctgctgaggaacacattcgccggacccgcaattaagtgcgcatgctttgattgcggcacgtacactaaaaagctgagcaaaaacaacagatgaagccaccatgaaacataaaacacggcggcggccgccggcgctgaaagaccgccgagcacaatcgcaatggaggaggcgatcggctccgtccaagacagagaatgatcgtgccataaaaggttcatggcgttcccgagaagcaccgtcaccatcagtccgccgataaacagcaggacaagccccgctttaaacccgcgtttcagtctgacgagtttttcaatgtagcgccggtaaaacgcccagactacggcgattaaaatcaaaaacgtgacgatttcctgaaaaaaggtaaacgccggataaagcggaccgaacggcagatggcggtcaggaagcagccctttcagaataaaatcaattgcgccgaactgaacgagtataaaaccgtaaaaaaacagaacgtggatgatgccgctctttttatctttcagcagttttttctgtccgaacacattcacccatatcttctgaagacgttctttcaggcgtttatcaaattcttccctttggccgagcttaatataagcgatcctcgttctgatcaggtaaacgaataaataaacggcgtaagcggttacagctgaaaacagcagcgcgtttaccatgagaaatgcgttcatcttgtctccccctttgttctgatacccctcttcattgtcatatctttactttatcataaataatgaatgagtgttcagtcaataattaaattcacattctcagggcacactacgaatacttcggaaaggagcgtcggtatgaaggtcatttttgtgttgcttgtcatttttatcatattgatcgcacttatgctgcttgatatgctgcttggccgggcggcgtacaaaaaacaggcgtatgagcccgtttttgacccgaaaaagagtgatatcacactcattcactgcggcagcgagcttgtgcggcagatgacggctgatatccgccaagccgtctcttctattcatatgatgttttttattatgaagaacgaccaagtcagccatgagatgtttcatttattgaaggaaaaggcccaggccggcgtctccgtatatctgctgctcgattgggcgggcagccgccaagtgaaaaagccttccattcaaacgatgaaaaaagccggcgttcacgttcattttctaaataaaccggcatttccgtttctatttttcaggctgcaaaaacgaaatcaccggaaagtgaccgtcattgacggcaaaatcggctatgtcggcggttttaatatcgctgaagagtacctcggcaaaaaagcgaagttcggaaactgggaggattatcacctgcggatgaccggggaaggcacggcggatcttcagactctttttgtaagcgatctgaaacgaaacaccggaaaggcacccggatcacccggggtttatccggcattatccgaagggaatatctctcataggacatatgcgtctgacggtttttcgcttgaatcgcattatgaaaactgcatccgtaaggcggagaaaaaaatcattatcggcacgccttattatgtaccgagcaaaaagcttcaggaagcgcttatttcagcctgccgaaaaggcgtcaaagtcatcttgatcgtgccgatgaagtcagaccacccgctcgttcgggaaacagctttcacctattatcccgagcttctgaaggccggctgcctcatctatcggtattatcaaggcttttatcatgtcaaagctttcattattgatgaccgcatcagcattatcggcacgccgaattttgataaacggagtctgttctggaatgaagaggtgaatgtcatcattcatgatgaagcctttacaaaggaagtgctttcaaccataaagcaggacatcgaaaaatccgagcttctcacattagaaaaagtgaaacagcgctccgtcagacagcttcctgcagaatggctgggaaaggccatatcttactttttataaaggagaaaccatatgctgttcagattcggattcgtcgcaaacgccatgtgcctttgggacgcgtcccccgcaaaaaccttaacatatgcgcgctataccaagctttcccgcagtgagcggaaagacgccctgctttctgtgacgaaagcaaatcttaccaatacgctgcgcaccatccactatgtggtcggccacggcatcccgctgtacaggttctcaagctcgattgtgccgctcgccacccacccggatgtgctgtgggattttgtcacgccgtttcgccaggagtttcgtgagatcggcgggctggtcagaaaatatgacctcagaacgagctttcatccgaaccaattcacgctttttacaagtccgaaacaggagattaccgcaaatgcggtcaaggatatgacctatcattatgacatgctggacgcaatgggcatcgcggaccgttccgtcatcaacatccatgtcggaggcgcttacggtgacaaacaaagtgcccttggccgtttccgcgtgaatctgaaagaacttcccgatgtcatcaaacagcggatgactttagaaaacgatgataaaacatatacgtccgaggaaacactcagtgtatgtgaacaagaaggcattccgtttgtgtttgattatcaccatttttacgccaatccgaccgatgacgctgatttagatgacattcttccgcggatgatcaaaacatggcagcggatcggcttaaagccgaaggtccatctctcctcgccaaaatcagaatcagccgtacgcagtcatgcggactatgtagatgcgaattttattctcccggtgctggagcggttcagacaatgggatacggacatcgattttatgattgaggcgaaagagaaagaccgggcgctgctccggctcgtcgaagaattaagcgccatccgcggagtcaaacgcctggcgggcggagtgctgaagtggaaggcataaccaggtttatcacccgtttatatggggaatttccgaaataacagaccatcagacggaggagaaaacatatgaaaaacattacatctttgaaaatagccgctaagaagttcactttacgaaacatgcttcagctttatcatctttgccacacgggaggccacgagctgtatatctactctaaaaaaacgatgtgcaaaatcaaagatatcattgagctggaaacgttcagaatggcccataaagaacaagaatatttaattgtagtggaaggaaagaaagcggtgcagcttgttgaccgtttcaaacatatcatcgaacctgcgcaaaaagaagcccattaaatacggactacataaaaaaaaggatagacaggaggctgaccccttttgtctatcctttttcttttattgatgtatcagctcgccgaattgggcctgatgaagtctctggtacatgccgccggatgccagcagttccttatgatgaccttgttcagcgatgccatctttcgtgacgacgacgatccggtccgcatccttaatcgtagccagccgatgggcgatcacaagcgttgtgcgtccttcagacagctcttgcagcgatttttgaatggcggcttccgtttctgtatcgagggctgatgtagcctcgtctaaaattaagatcgacggatttttcaaaaacattctggcgatggaaagccgctgcttctgcccgcctgacagcttcacgccgcgctcgccgatcaccgtgtttaaaccgtcgggatacccgtttaccaagtcctctaaatgcgcctggcggacggcctgccagatttcttcctcagacgcgtccagccgcccgtaagcaatgttttcccgcaatgtgccggaaaacagaaagacatcctgctggacgacgccgatttgtccgcgcaatgatgacagcgtcatgtccttaatatcgattccgtcgatggaaatcacgccttcagacggctcataaaagcgcggcagcagacttgtcagcgttgattttcccgctcccgaaggcccgacgaatgcgactgtctccccggcatgaatggacaaattgattcccgacagaaccggactgttttcttcgtaaccgaatgacacaccatcataacggatattcccttttaaaccggacacatgtctcgcgttcggggtgtccttgatatcaggctccgtttccagtatttctataaagcttttaaaaccggcaatgcctctcggatacatctcaataatcgcgttgattttatcaatcggacggaacagaacgttcgtcagcagcacaaaagcgacgaattccccgtaagataacgatccgcgtatcacgaaccatgtgccgcacaataagacgaacagcgtgacaaatcttgtcagcatgtaactgatcgagccgtttttcgccatgattttataagacgtcagctttgttttgcggaaactctgattgttcacgtcaaaccgctgcgtttcaaacgcttcattgctgaaagcctgaacaagacggatgccgccgatattgttttcaaccctcgcgctgaagtctccgacgtctttgttcagttttgtaaacgcagaggtcatttttttattgaaatacaaagcaagccaaatgacgaccggcataatgataaaagtcaacagcgcgagctgccagttaataaacagcatcacaccgaacgcgcccaaaatcgtcatgatcgcgataaacaggtcttcaggcccgtggtgggcggtttctccgatatacatcaaatcattggtgagcttggacattaaactgcccgttttgttgttatcgtaaaatttgaacgaaagcttttgcagatggtcgaaaagctttttccgcatatccgtttcaatgttaatgccgagcatatggccccaatacgtcacaacatactgaagtgccgagctgagggtgtagaccccgaataaagcagcggaagtcaaaataatcagactccaatcccgccccgggagcaatgtatcgataaagtaattgacaatcagaggaaaactcagctccatcaatccgccggcgatggcagaaaagaagtcgagaaaaaacagctttttgtacggtttataataagaaaaaaattgtcgcagcacgattccgtcctccttgtgcctcgttcttaatgataatatttctcaattatactatacacaaggagttttaaaagcgttttttataaaacgccggaaaataaccgtgcgaaggattccttcgttctttcccataatgtgcgcttatagaaacggacggggctgattttttcagactccttcatatcctccaggtaatgcgcttcaagatctttgatcgcctcttgatctgtaaaaaagacattgacttcaaaattcagctgaaagcttctcatgtccatattcgccgtcccgacagaggcgaggtttccgtcagtgatgagcaccttttgatgcataaagcctttttgataagaatagacttcgattccttcgcgaagaagctcggggaaatacgatctcgtcgcgtactgggttaaaaatccgtcattggtttccggcaccatgacacgcacccggacgcctctggcagcagcctcctttagcgctgtgcggatcggctcattcggcacgaaataaggcgttgcgatccatacagacgattcggccgccgctatcatggcataatacagatcgctcatccgctccttcatatcggggcctgtcggaacgacttgatagacgccgccgctttctgccgcaaccgggcgggtatatgctttctgatcaatcagcacctcatccgaaacgtattcccaatcaagcataaaaatgctgtggagcgtctgaacgatttctccttcgactttcatatgggtgtcccgccaaaagccgacatcttggtctttgccgatatactccttgccgacattcagcccgccgacaaaaccgactttcccgtcaacgatgacgatcttgcggtgatttctgaaattgaatttttggttgaaaaaaccgtatttcagcggcagaaacgggacgatgttcacacccgcgcgtttcagttttttaatatcttttccggccagcttcaggctgccggccgcgtcgaacaaaaaccgcacttccacgccttgacgcgccttttccatcataatgtccatcatcttgtgcccgagcatgtctgatttgaacatgtaatactcaatatgtataaatgacgcggcctcccggagcgcctcaaacagctccggaaatgtttcgtccccgtttttgagcaccttcagcctgctttttgtattgatattcatatgggacgccttgattgaatattgaaagaaacgcttctgatttcctttcagcccggtcaggtcgggagtttgttccatatcaaatatcgttctcagcttttcccggttgtatgtccgtttcgacctgaacagcttgcctttttcataaagctggccggaaaaaaggtaaaataagtacccggcgatcggaaaaaacacaagaatatgaatccataacagcgtgtgctgcgaggtgcggttttcaagaattaacgaataaatgctgaacaaaataatgcttgcataacaaagcacccctccgtaaaactcaagcctggaaaccggaaaaaaccatatgacatatgctacgataagcatcatatataaaaagcaaaattccagtctccttttcagcatcccgactctctcccatctgatccgatatctctgtataccctctgttttccggcttgtaaacatatgaaaaagcctctccgcacgagcggaaaggcttatgatgaagcttcctgtgattggccgggtgtgatgttctgaagcaatgccggattgagcgagcagctgcctttgattttatttttgaagatgccgatgatcagaccggtgaccgctatcgacactaaggagaagagccctttcagcagcccgacggaaaaaatgccggccagcacgaccccaaaatcgaagaggaaattaacggcacccggattccatccgcagcgcttttgcagaaataaagcaaggatattggcgccgccgagcgatgcctgatgataaaacatgagcgacaggccgaacccgatcagcgccccgccgcaaatcgccccggcaagcggtgaaacagagaccggcggcagccagtgatccgcgccggtaaatagagtcagcactgtgactgcaaaaacggtggatagagtgaatttgattcccattctgatgagagaaaatatataaaacgggatattgatcagaaagaagataatcgcaaacgaggaatgaaacaagtatgacaggcttagtgacagtcccgctgtgccgccggttaatacttgagaatgtctgagtgtcaggacgccggcgcttgtcatcagacaggcggctaaaatgaggaaaatccgcttcattcttcactctccttttgttgctgttatttccaaataaaatataacaggaatcccggccgcccagccattaccttggcagaaaatatcttatgtttttattttttcaccataaaaaatccccctcttgcaggggggatttttacgtgcgtttccgatagacaacatagctgcgggtcaaatacttgaggggcaggctgaacacgtgaaccaatcttgtaaacggccaaaggataaaaacgacgtaccctatgatgatatgaaacttaaaccatagcgggacactttccatcaaagaagcgtcaggccggaacaaaacaatttccctgaaccacggcccgactgttgccctgtaatcaaatcctttcgagtcaatgttgaggaacgtggccgcaacgcccgacagcatcatgaacagcagcagaataagcgtcaggatatccgatggcgagctggttttgcggattcttttgtcaaacagccttctgtacgtcaggatgacaagtccggcacatgcagcaatccccgccggcaggcctgcgccgatcgccattttgtgatacatatgctctgaaatgccaagggaagcatacacgccttccgggatcagaattcccatgacatgtccgccgacaacgcacagcagtccccaatgaaaaagtgtgctgccagccgcgagttttttcttttctaacagctcgcttgatttcgccgtccagccgaattggtcatgctgatagcggtaaatatgcccgccgataaagatcgtcaatacaatgtatggcataacgccccacaggatctgcccgctcatgcctgaacagccccttcttcagtgcttgcatgtacaccgatgttttccagtgcggcctgcagcacgtgcagcagctcagcatagatgctgttatttttttcgaggcgggaagccagctccctcacattggacaggtatttctcaaacacgcttctcgccgcttcaatctccgcaaccgcggcgaattccagcatcagcggcaggtaatcaggcagttctttctctgtcggcaggaaaccggattgctggtaggtgttttttaaatgcagcaattcaatgccgcgttccctttgttcgcctgagttaaagtaggtgacgtacatattcgttttttttccgaaatcgaacgtatacacatagtgttcaatcagcgcttgcggagaaaagcctgcttccgcctctaaaaagtgcagcaatttctcccggatttgctgattggtgatgtcatggataagagccttccaatcgggaatctcggctctccactcttcatccggataagagagaagaacggaaagagcgaagaacgtcatttgccggtctgtggtgttcatgttattacacctcatttatgaaaaattagaaacaagagccggggccgcctgaaaatgataaaccgcagctcccttgttcagcatataaatctgacacttcttctcgatggctgctcgggatcacaaaacggtcatcatatttggcgattgccagcagccgatacatgtctttaatttgctgttctgttaagccgacactggagaccaatgccgggtccatggatttattcgtctgaaccgccctcatatactggcgcatgacagacattttctttaacgtggatcgaatatgatccgtatcccccgccgttaacagctgcgccaaatagtcaatcggaattctcatttggtcgatagccggaaaaatcgcttccgccgtttgccggcttccttttccttcaaagagattcataatcgggctgagcggcggaatgtaccaaaccatcggcagcgtacggtactctggatgaagtggcagcgcaatcttccagtcaatgatcattttatagattggtgattgctgcgccgcttctatccattcagccgggatgccttgttcttttgccagtttggcaatctcaggatcattcggatcaagaaaaacgtccagttgggaatggtagagatccttttcattttcaacagaggccgcttcctccactttgtccgcgtcatacagcatgacgccgagatagcggattctgcccacacacgtttcggagcagatggtcggcagccctgcctccaatcgcgggaagcagagtgtgcatttttccgctttgttcgtctgccagttaaaatagacttttttataaggacaggatgagacgcaatatctccatgaacggcatgcattttgatccacaagcacaatgccgtcttcctcgcgtttgtacatggcgccggacgggcaggaggacacgcacgccggattgatgcagtgttcgcaaatacgcggcagatacatcataaagacctcatcgaattccgttttaatggattcctccattttttgaacgtttggatcttcaagccctgtaatatggccgcccgcgagatcatcctcccagttcggaccccattcgatattcataaaatcccccgttaaggacgatttcggccgcgccaccggctggtgctttttttgcgggctgtttgttaatgtttcataatcatagttccaaggttcatagtagtcatcaatcgtcggctggttcgggttatagaaaaggcctgcgagccgattcgttttcgggcctgatttcagttcaagctttccttttttcaacgtccagccgcctttatatttgtcctggtcctcccattgcttcgggtagccgatgccgggctttgtttctacattattgaagtacatatattccgcaccggaacggtttgtccatgtgtttttgcaggtgacgctgcacgtgtggcagccgatgcatttatccaaattcatgaccatcccgatctgcgctttaatcttcaagccaatcgacctccttcagcttgcggatgacgacattcaggtcgcgctgattccccgtcggaccgtaatagttaaagccgtaactgagctgtgcatagcccccgatcatctgggtcggcttgacgtgaatccttgtcgggctgttatgggtgcctccgcggttattcgtcagttttgtgccgggcacattgatgtggcggtcctgggcatggtgcataaacgccattcctttaggaatccggtgagacaaaaccgctctcgcgacgacaacgccgtttcggttgaagcattcaatccaatcgttgtctttgatatccgtatccgcagcatcatctttattcatccacacagtcggcccgccgcggaacagcgtcagcatcggcagagaatcaaaatacatgctgtggacggaccatttattatgcggcgtcaaataattaagaacgatttctttgccctcttgatcaggccgcttgcttaggaacggacggtgctggaggatcggtttaaatgtcgccatcgtttcaccgaattccatcatcagttcatgatcgacataataggattgtctgcctgtcagcgtccgccacggaattaatttttccacattcgtcgtaaacggcgagtacctgcgccctcctttttctgaaccggtaaaggccggagaggtgatgaccgttttcggctgggctgtaatttgctcgaacgtaaagcattcttcctcgcgctcttccgccaggtctttcagctccagattggtaatgttttcaagtgattcccatgctttcacggcgacttttccatttgaggtggacgacagggttaaaatcgcttccgccgcctgcttcgcttcacttatattcgggcatcctttggcaacgctgtttgaatcggtttctcccagtctctgtttgagtgattcatattcatccgcaatcgaccagctcatcccttttgttccgctcggttttaaagccgtatgagggccgagcgcggtcattttatgaaaaatgtgtttgtaatcccgttcaacgacatggatgttcggcatcgtttttcccggaatggcttcacattcgcctttgctccagtcattgattttgccgaatggctgggccaattcctgcatggtgtcgtggaggagcggcgttgcgactacctctttcaccggctccatatcgacttcttccgccagatcggaaacggcttttgacagcgccttaaaaatatcccagtctgacttcgattcccacggcgccgagatggccggagcaaatggatgaataaacggatgcatatccgtactgctgagatcgtgtttttcataccatgtcgccgccggcagcacgatatcggaatacagcgccgtacccgccattcgaaaatcaagattgattaacaagtcgagcttgccttccggcgcctgctcccgccatttgatttcttcagggcggatgctgtcgctgtcgtcattcatcagaccgttcgtcgtccccagcagatgcttgagaaaatattcatgccctttccctgagcttgagatcagatttgcccgccatacgaagagattccttgggaaattcacttcattgtcagggtcttcaatcgcgaatttcagttttttctcttgaagccgtgaggccacgtacgcacctacgtcttcaggtgccgccgcccccgctttctcagcttctttgtacagatcaatgccgttttgattgaatgtcgggtaagacggaagccaccctaatcgcgccgccagcacattgtaatcggcgtgatgcttgtagcgggatgacgcggcgatcggtgaagccaagtcactgatcggctggtcttcataacgccactggtctgtcgcaaagtaaaaaaatgaggtgccgttttgcagtttaggcacgccttcccagtcctttgcggttgcaatcgtctgccacccttcagccggacggagcttttcctgccccacgtaatgggcccagcctccgccgtttacgccttgggcgcctacgagtaaaacaagatttaacaccgcacggtaaattgtgtcggagttgaaccagtggttgatccccgcccctacgataatcatggatctgccgtctgtatcaatcgcattttgggcaaactccctggcaatctgtataacggcttctcttttaattcccgtgatctgttcctgccaggcaggtgtgaacggacggggatcatcataggatgcggctgattgtccgccgatgccccggttcacgccgtagttggccaatatcaagtcaaacacggtcgtgacgtacgtttcttcaccattcagatccaattttttaataggaagattccgctcaagcactttgtttccgtcatttgaaaaatacggaatgcgcaccatgccgatttcgtcctctattccgagcacggagagacgcggttcaatcggttccccggtgtcttcgtcgatcatatgcagattccatttctgctgcccgtcccagcgggagcccattgtgccttgcggtatggcaaacgcacctgtctgttcattccagaccgccggcttccactgatcattttttgtctgccgcccgatgtctttcgcatgcagaaaccgcccggctgtatacacgccgttctcttttgacagagtgacgaagaatggaaaatcggtgtattgcttcgcgtactcaataaaacgttcagtttcttggttcacgtaaaattcctgcaaaatgacgtgacccatcgccatcgcaagcgccccgtcagtcccttggcggatactcagccagtcatctgcgaactttgaggattccgcaaaatccgggctgattgaaatgaccttggcgcctttatagcgggcttccgccagaaaatgcgcatcaggcgttctcgttaacggaacgttggagccccatgtgatgatatagcctgaattgtaccaatcactgctctccggaacgtccgtctggtcgccccaaatttgcggggacgccggcggaagatccgcataccagtcataaaaactgagcattgggccgccgattaacgacatgaatcgcgagcctgacgcatggctgatcatggacatcgccggaatcggagaaaaaccgacattccggtcaggcccgtatttcatcactgtatacagcagagaggctgaaatcagcttcagcacttccggccattccgcgcggacaaagccgcctttccctcttgcctgtttataggacttcgctttttcaggattttcaacgatcgatttccaggcatccagcggattttgatgtgcctgcaatgcttcccgccacaaattgatcagcacacctcgcacatatggatatttcacacggagcgggctgtagatgtaccaagaaaaactggccccccgcgggcagcctctcggttcgaaatcaggcatatccgggcctgttgatggataattcaagttttgtccttcccacgtgacaattccgtttttcacataaatattccagctgcaagaacccgtacagttgacgccgtgggtggagcgaacgactttgtcgtactgccatctgtttctatatacattctcccaatcacgatcttcgcttgtcgtttggctatgatgatttgaatgatgttcgataggagaaaaatagtttaatctcctgagcaacggactcattttctttttcttcatgatcgttcactccttccgagtcaggtgatgctatgtacactataaacagagacggcgcatcaccttgtgaactatgtcacacactctgcttttttcacaaaacgttcacacagagcagcaggaaggattttcaaacgatatggggacgcccgcgtcatcaaaaaaaccggttctgtttaagaaccgggttcggcgttttcatcccgtgatgtatgcagataccgcaaaaacaactgataggaacagaagacattttgctgaagcatcgccaaaaagttcatttgcagccgcggatggtaagacatcatttgcttaaatacggaatatggaatatgaagtacaagaatatccggtgaggcattgactgagataaaaggcgataaatagagcccgcctttttcatcaatcggaaacacatcgcctttttcccacagcgcaacggtttgcgacccttcagggagcctgctgtccgtaaaacggatattgccttttaatacaatataaacggattgtgaatgaagaaaggatggagattggtcagatgagccgcggataaacgtcccgtttttcagcaaggtttcgacaatggacagaggcacttcattaaacataggaagttgtttcagaaataataaatagtcacactgattcataggaaagcctcctgtgctaaggatagctttagtgtagcccgattgaggccgcgcggcagtgatgtatttcacagcttgtatgataaaagtcacttatcaggagagtgtctgcatttataatgaaataaaaaggagggtttcgatgaaggcgatgattccgaagcagcacggcgcatgggcgatgctgctgattccatttttactcggcatggtcaagggtggcccggttttctggcatattccgctctttttgggctggctgttcctttacttgacggtttatcccgtttctctcgctttgaaaaagaaacagcttcagccctatcaaaagtggatatggtattacggttttccggcctgctgctttttgatcatttctgtctttcataagccgcagctcgtctggatcggcgtttttttattgccgctgtttctcatacatacgcattatgcccgccgaaaaaacgagcgggcgctcacgaatgatattgcgggtgttctgttcttttgttcaggcgggcttgcgagctgctggctgggaactggaacccttgacggctgggcttggtttctattcttgcaatccgctttattttttgtcgggagttctttttatgtgaaatcggtcatccgggagagaaaaaacagaacctttgcatactggtcgtggggatatcacctcttgctcccctttttatcggctcttctcggggcaggctgggcgtttctcgcttttatcccaagcagtctgcgggcctggttttttcacggaagagactggccggtgaaaacgatcggcattctggaaatcgtaaatgccggcttctttcttgccgtcatgtgcctgtttatcacaaggtaaaaaaacaaggacaccgctgtccttgtttttttcagtcaatattgcagatctcaagcggacaattttcacactcgatctcacatcgtaaatagtcccgcttgtgcaaaataatttttccggtttcgtctatcgatataaccccttgtttgcggaggtctcccagcatgcggttgacgctctcccttgccgccgcgcaaaacttagccaaatcctgatttgtcagcacaatgttaatcagaatcccgtcgcttcgttccaccccgtagctgtttgataagcggataagggtggaatagagcgccccctttttgccgtgaagaagcaggtccctgatcttggactggatttttcgaagatgggtgctcatccatttcataaattcaaacgtcaaaacaccgttttggatcaattccttttccagcttgtttttattaatgacgagcacctcgccatcctctaacactttcgcactgagcatatatctcggctcatctgtgaatagcgtcaattccccgacaatatcgtttttttggcagattctaagcgtcaggtcttttccgtcagatgtcagcttgccgatttcaatgagtcctgactgaatcagataaagctcttttgcttccattccttcttgaaacaaataagtgtgttttttcattttccttttcgtactgatcgattccagcaattcatgcagttcgcgggaaagaagttctttatcagattttcggacagagagaatattcatgagctcacctcgaagaaagtcacgttgcgtatgtatattgtaacgtgacttgatttgcactcacccagaaaaaactaacaatcttgtgaatggatcattatgaattgaggctctgactgtttctctccgtatgtgttttcattctttcctgccaatacatccagatcacaaggacaaagctggctaacgcgacctctgaaagcgccataaacccgatcgcgtattggcctgttgcctgaaatacacttgccagaatcagcggagggaaaaaaccgcccagtccgcccatagctgaaacaattccgttggcaatccccgcttgcttcgaaaaatagaaaggcaccagtttaaataccgtcccgtttccaatccctgagcagactgccaccgtcagcgatccaaacgcataaaggccgatcgtcggggagaatgacagcatgacccctgacagcgtaagccctgcgaaaacgaacatcagaatgcggagcgggctcagtttatctgcaagaaaccctcccacaggcctgagcagcgtagagaccgcaataaagccggccgtccgcagaccggcgtccgcagggctcagcccaaaatgctcaaccaaaaaattcggaagatagatggtaaaggcgacaaaggcgccgaacgtaataaaataaaacaggctcaacatccacagcacatgatttcggtaaacggctttcatttgtgtctttatggaaactttgactttcttctcatgccggtcgccgaacaaaacgtgcaataatgcgaaaacagccagcaaaacaagatacatctgcacggttgctttccatcccgcggcttgagcgataaccggcgccgcaaaggtagtaacggcggtcccgatgtttccggcaccgtaaatcccattgacgactccgtgcttttctttcggataatatttcgggagggacgtcactccgatggagaataccgctcccccgatccctaagaaaaagccgcccgcgattaaatcaaataaagaatccgcgatactgatccaaaatacaggaaacaaaagcaggatgaagctgatcataaacatcagccgcgccccgtacctgttcgttaaatatcctaaaggaatacggagaagcgatccgagaataacgggaatcgccgtcaccaatgaaatttcgcctttgcttaaatgaatatctgatgtcatttgagaaatgagcgatgaaatcagcacccacaccataaaccctgccactaagcttaatgactgcaacgataattgaatatgttgacgattaatcattcggcttgcccctttcactgattcaatatcagtcttatcatacaaaaactcagtgtgcgggattgtgaattacatcacacgctttatatgcaaaaaaaagaacaaagcccgaagactttgtcctttgatcatcattacattttttccggagcggatacgccgatcagctgaagcgcattgttcagcgtaatttgcgtcgctttcattaaagcgagacgcgcgcggctcttctctttattttccggatcgatgactttctccgcattgtagaagctgtgcagagcggaagccagatcataaatatagtttgtgacacggtgaggaatgcgtttttccgccgcttctgccactgcctcagggaagccgccgatcgttttcagcaggtcatattctttttctgattgaatatggctgaaatcaagatctgccgccggtttaagtccctgctcctccccttggcgaagcatgctgcaaatacgtgcatgtgcgtattgtgcataatacacagggttttcgttagatgtggatacggcaagatccaagtcaaaatccatgtgcgtatcagcgctgcgcatcgcgaagaaataacgcacggcatccaagccgacttcttcaatcaagtcgcgcatcgttacggctttccccgtacgtttgctcatcttcattttttcgccgtttttgtataaatgaacgagctgaatgatctcaacttccaatgtgcctttcttgtaaccgagcgcttcaattgccgctttcatacgcggaatatacccgtggtgatccgcgccccatacattgatgagcttgtcgaatccgcggtcaagtttgtctttatggtatgcgatatccggcagcaaataagtgtatgagccgtcttttttgatcagcacacggtctttatcgtcgccgaacgttgtggagcggaaccatgtcgcgccgtcctcttcgtatacatggcccttttcgcgaagcgcctcaagcgcctgatcaatttttccgttttcgtacagtgacgtttcagaataccatacgtcaaacggcacgcggaaattttccagatcggagcgaagtttatcaagctcgtactttaagccgtattcacggaaaaacgcctgacgttcgctctcctctccatgtacgaaacggtcgccgaaatcttcggcaagctttttcccgatggcgataatatcctcgccgcggtagccgtcttccggcatcggtttctcgagaccgagcgcttcaaaataacggacttcaacggaaagcgccaggttgttaatctggttgcccgcatcattaatatagtattcgcggctcacatcatagcccgctttagaaagaacgctgcacagcgcgtcacctaccgccgcgccgcgcgcatggcctaagtgaagatctcccgtcgggttggctgatacgaattcgacctgaatcttttcgccttgtccgatgtttgtctctccgtaatgttcacccgcttcaagcacggacgggatcagttttgttaagtagctgttgttcatgtaaaagttgataaagccaggtcccgcaatatccatcttttcaatggaagctttgcctttatcaaatgacgccacgatctcctcagcgatttggcgcggcgctttttttgcgattctcgccagctgcatcgccatgtttgtggaataatcaccgtgtgttttttctttcggcgtttctaacagtacgcttggaatctggctttcgtccgccaggcccgctttcagaacggccgctttgatttcttccttcagcacgtccttcatctgttccgcaatattcatgcctttgtttcctccttatattggatcgtcatgttatgtacatgttcttggttttcgcctacagtcatgttatatgtcattttgacggagccttccgaaccgccgacatcagcttgtatgtttttcgtttccgtacggagctccatttgtccgaacggcagtttatattgagtgagtgtcgatgcccccggaatgaaccgctgtttcatttggatggcgcccgatctcatcacgagaatctctttttctgtgatcttgacgaccgttttaatcttgcccaaatcatgctcttcgtgataggaaagatacgttttgccgtttctcacgtaatagaatccactcgatgtaaattcaaccgactcttcttctgagccgttgtgtatgaatgattgcacatgaatggctactggtgtctcctgtctcatgctgacacttccttttcatcatcccgcttaacctgaatagtataagttttcaagggaaaaagttcaaccgcttcctcctatcttaccatctttgctgattggttttgaagataaacatgatttttaaggaaaatgaaaaaaccggaaatcccggtctgcgggataaatgcggttccttcggcggacggctttgtcaacggggaaaagtttgcggtatttttgcgctatccttccgaatgaaaatgataaaatatgtcatatacataacgtggaagggagggattcggaatagtggcgagtgttttatcgtcttcagcggttggagaaaaaatcaacgaatggtatatgtacattcgaaggttcagcatcccggacgccgagtacttgcggagagaaatcaaagaagaacttgcaggcctggaagatgatcaggatcttcatctatactattctctcatggaattccgccacaatctgatgctcgaatacctcgaaccgctggaatcgcagcggatagaagaacagccgagactatcggatctgctcgcggatattgataaaaagcaggcccggctgaccggacgtcttgattattattttaattttttccgggggatgtatgagctggaatgccgtgaatatctttcagcgattcagttttttaagaaagctgaatataagcttgattttgtcaaagattgtatcgagaaagctgaattttattttaagatgtcagagtcctattattatatgaaacagacttatttttctatggattatgcccggcaggcttataaaatttatcataagcaggaggcatataatataagggtgcttcagtgccattcattgttcgctaccaactttcttgacttaaagcaatatgatgaagcaattcagcattttaaaaaagcttatgccatggcagaggcagaacagcagcctcaattaatgggccggactctatataatatcggactttgttttaacagccaagaaaattacaaaccagccattgactacataaaacgggcaatagctgtttttgaagatgggaacatcatcacttctctcccgcaagcctatttcttaatcacacaaatacattataaaatcggaaatatggccatagccagacaatatcatgacaaaggggtatcttatgcagaggaggcagaagattccctatatatcgccgagtatgaatttttagaatctttatatgtcggtgagcctgatgaagaagcaatcatggaatgttttgactttctcagagataaatcgatgtatgctgatcttgaagattttgccttagatgtggcaaaatattatcatgaaagagaaaatttcgagaaggcttccgcatattttttaaaggtggaagaaacaagacagcagattcaaggaggtgtgaagttgtatgaaattgaagtataaattagcacttacttgcttggcaataagcactgtttttgtttcagccgacatcgcaagtgcaccgaaacatcaatttgaagttgctcagcgcggaatgatttaaatgatgattacttttaggcttgcaggttaaactgcaagccgttttttatataaacaactaatttgcaaaaacaaaaagtataccttaaaattcaaatgtgtaaaaagtatttgacacacatacatatattatttaaaataaatatatataaatttgaaaatttaaaataaaaacaaaaatatttaaggagggttttagtggataacaatattaaaaaacttagaacagcagctgatatttcacaaaatgatctggctaagctctgcaatgtgaccaggcaaaccatcaatgcgattgaaaataataaatatgacccgactttaagtctggctttttcgatagctcacgcattaaatacgggaatagataaagtattcaactataacgccaaaaaaaagtaagggagcggttcttatgaagaaaatggatgagatgcaaaaacaccaatcgggtatagccgccagaatagcatttagtttttatactgtcgctttactgatatggtcattaatagattattttaaaaacggaaatacaggatggcaatttccaatacttttaataggctgcgcgctctatttatggattcaagtttatcataatcgaaaaacaaggtaacaattccaatacacttccggaggattatacagcaatgtacgaatataagttcataaaagtagaagtaaaccgatggaaaggaaagcctaaagaagactataaagaaattattgaaaagtattcgcagcaaggatggaagctggttcaaatatttgctcctcctatttcaggttatggggcagccgattattttgatattattcttgaaaaaaaagtataaatgtttcagtacaaagaaagccggatcatacatatggtccggctttctttgtactgaaaataagccagcagataccttaacggatttcacctcttaaatatttttttcggaaatccgcaattcaaatagctttcaatatattttattatttaacttgctggggatattgaaaaaattggaggaaaaaatgagtctacttttaaaaacacaaaatagtaaagcgatttttacattagtagcatcaggaatcattgttctcgctcttttcagtataaaacataatcatttaagcatggatgtcatcgatattttaaacagagctggaataatagctcctagttggattgtcagtgctatcaccgcaacgggttcagtcctggctatcattactgttttaggatctcttggtgcaggcttgccattagccgttttagaacaattggctgcagcaagtacagcagcagcttaatataaaacattaaattcaatatccctggcagtcccttaaacgaatggatgaaaatactttgtttaaaaagaacgttttagtcaaattgtacatactctgtctgatcttatttttaattgctttatttacagcttatttttatacagatcccgcttcaaatgtaaataatctaaatcgaaatatccgtccggatttttttcagattttctttaataatattaaagtagcgagtctgcttgtttttttaggcccgttgacgctgtcgcttggcacggttgctgttttaattattaatggattcattttagggaatgcgataggaaacatcaaagacaatttaaaccttttactgcttgttattccccatggaataattgaagtgccggtattgcttcttgcagcctctgtaggaatgaaattaactttggatttattactcctcaaaataaatttgaaattcacttttaaatatattggtattatatttctcggtttaatgatagcagctatgttagaaacatttcttacacctatctttataaaaggagtctcttaggattatgcaaattgaattatcttcatttaaggatcgaaacattaattttttgtcctcatttttgttttatattatcgggttagctttttatttaagttctctattgccttttatgaaaagtttaattcccaaaaacatccctatacaagttgttgagcaagtaaaacatttagattatatcattgcgatagccgcactgtttcttttaatgttcggggtgatttttgaaggatttgtactatttctcattataaattttcttggtgctcaaattaagattaaaaccttttattccctatttatgttttctaacatcccggtcgcaattaagttttttcttatatcattcaaaaacattttcgcagaacatccaaatactagtttatttttcacaagtaatcatttgattttttctatctttgatttgttcaatattgcctatttatttcttttgtttattcttctgaaatggagaacaagtttgaactacctgacaatctcagtttttatttttacggcattcctgtatagaatgtttttttagcatatataaataaaccccctcaataggggtttttctttcatttcgttcactgtatacaattccttttatatgcttccgaaacaatacccactctagtactcacattccactttttacagagaccggctatgatatattcgacattacgctgcgagtagtttaatgacttagcgatctctttattaggtttttcagcaattatcagtttaattacagaaatttcaatcttttttaattccaattcattttctactgctgttttcattctaacttcctttctaaaaatgtatttactaaataataccctattatataatttttatcaataacatcaattattaatagtaaaataatatagcttttactaacttctaagtagtttatatacaatataaaaatcccccgccatgtttcaagcgggggaaattctttctatttcacaaacccaagcagcatttcacgaatcatcttgcttgccgtgtttgcggtttgttctgagtggtcatagaccggcgcgacttctacgaggtcagcgccttttacgctgacttctgagcgcgcgatttcatggatggacgcgagcaattctttagacgtgatgcctcctgcgtcaaccgtgcccgttcccggcgcatgagcgggatcaagaacgtcgatatcgatggtgacataaacagggcgtcccgcaagctgcggcagcacttttttcagcggctcaagcacttcaaacttagaaatgtgcatgccgttttctttcgcccattcaaattcttccttcattccggaacggatgccgaatgaaaatacgttttgcggcccgatgagctcggccgctttgcggatcggagtagagtgggaaagcggttcgccttcataatccgtgcgcaggtcggtgtgcgcgtcaaaatgaatgatggcaaggtccggaaatttcttatacatggcttttatgacaggccatgatacaaggtgctcccctcccatgccgagcgggaactttcctttttctaaaatgctgtccacgtattcttcaatcatatcaaggcttctttgcggattgccgaacggaagcggaatgtcgccggcgtcaaagaaattcaaatcagctaagtcacggtcgagatacgggctgtattcttcaagaccgatagacacctcgcggattctccccgggccgaatcgtgaacccggacggtagctgaccgtccaatccatcggcatgccgtaaaggatggcgtccgcctctttccagtcggggcggcttgcgataaatacttttcctgaatatgcttcatcaaacctcatgataaaaccctcgctttcctgtaaaaaagcgcaagattcgctcctgcgccgtacgtttttatttgattaagtcgctcacaaatttcggaagaacaaatgccgctttgtgaagctctttcgtgtaatatttcgtgtcgatgtcaaagaaacggctgtcctccacttcaagcggatcgtactttttagaaccgatcgtaaatgtccacaggccgctcgggtacgtcgggatattagccgtatacaggcgggtgatcgggaagatttctttcacgtcacgctgaacgtttgtaatcagttccggtgtaaaccacgggttgtccgtctgcgcgacgaagatgccgtcttcttttaacgccttggaaattccggcatagaagccttttgagaacagattgacggccggtccgaccggttctgttgaatcaaccatgatgacgtcatactcattctctgatttcgcgatgtgcatgaaaccgtcatcgactctcacgccgacgcgcggatcatcaagcttgcccgcaatggacggaaggaattttttagagtattcaataaccttgccgtcaatgtcgacaagcgtcgctttttttacgcttgggtgcttcagaatctctctgatgacaccgccgtctccgccgccgacaacgaggacgttttccggattcgggtgcgtaaataacggaacgtgcgcaaccatttcatgatagacaaattcgtctttttcagaagtcatgaccattccgtctaagaacagcatgttgccgaattcttctgtctccaccatttccagatgctgaaattccgtctgttccgtatgtaatgtttgtttcacctttaatgtaatgccgaaattcttcgtctgcttctccgtataccaaagctcgctcaattgtcatctccctttcaaggcttatttcatttattgtaagcgtctgtatcgcttttattccggttaaaatctcattttcacctaaggaaaaagtatagaggatggaggggaaaaagtaaagaagtgtccggtttgatatgtttaaaaaacccccttttttcacataataatagaatcatgaaaaagggggttcccaaaagtggataaagtatctggaaaacagctcagaatcacattcaaaatcatccgcgcctgcatctttctgacactgatcggcggaatgctggccggcgtctgcttcacatccgttcttcttgcagcgaaatggcagggggccccctccgtccgggttcctcagtctacgattctttatgcaaatgacggctcaaagctaggtgagaccgatttcggggaaaagcgctactgggtgcggttaaaagatatcaatccgatagcggtgcaggccgccattgcggtggaggatcaaaacttttacaaccaccacggttttgattaccggcggatggccgccgccgcgctggctgacataaaggcaatggccaaggttcagggcgcaagcaccatcacccagcaatacgcgagaaatctctaccttgagcatgataagacatggaaacgaaaatggaacgaagcattttacacgatccgccttgaacagaactattctaaaaacgagattttagaaggttatgtaaatacgatatattacggccacggcgcatatggaattgaagccgcctcgcgcctgtatttcggcaaacacgccaaagatctgaacgatgcggaagccgtgcttttggcgggcataccgaaaggcccgtccggctattcgccatatgtcagcgaaaagaaggccaaacagcgccaggaaaccattctccgactgatgatcggccaaaaaatgatctcaaaagaaaaggcggaaaggcttaagaaaacgccgcttgcctatcagccgctgaaaaacaggaccgcagcgaaaacggcgccttatttttacgatgatgcgatgaaagaactcgagaaaaagctaggcatgacgcgcgaacagctggcaacgagcggattgcgtgtttatacgacgcttgataagcgcatgcagcggattgcggaaaacactgtggcacatacgatccgtaccggctctgacattcaggtcggcttttccgcgattgatccggcaacagggcgcgtgcttgcgcttctcggcggacgtgactacgaaaaaagcccgtttgaccgggcgacacaggcgaaacggcagccggcttccacgatcaagccgcttttgtactacaaagcgattcaaagcggctttacaccggtcacgctgatgaaaagcgaagccacagagttcaagattgacgacaacggagatacttattctccaagcaattacaacggctactacgccaataaaccgattacgctgcttcaggcgcttgcattatcagacaacatttatgccgtgaagacccatctctttctcggcatgaataagctcgtgtcggcggcaaaggaattcggcatcagcgaacatttaaagcctcttccgtctctggcgctcggaactgaacccgtgcgcccgattgagatggttaatgcctacgcgatgctcgcaaacgggggaaaacaaatcaccccttcctttatcacaaaagtgacggataccgccggcaacgtcttgtatgaacagccgcgcggacatcagcagacgcttgataaaaaagccgcttttgtgacggcgagcatgatgacgggcatgtttgatcaggatttaaacggctatacttccgtcacgggacgcaccatttcggaccggctgacccgaacctatggcggtaaatcaggcacgaccagcgcagacagctggatgatcggctttaacccggctcttgccgccggtgtatggacaggctatgacaaaagcagcacgattgattcagtagaggaaaaaagctatgcgaagacgatttgggcggactttatggagaaggcgctcgaaggagaaccggaaatagcgcttaaaccgccgaagggcgtcacgggcgtctatatcgatcccgcatccggctacacttccggacccggctgcgccgcaaagcattatacgtatttcatcgcaggcactgagcccgcggatgtgtgctacggaccggaaccttctaaaaaagaaaaggaacacgcccccgcccgcaaagaagctccgcgcaaaaagtggtgggacaagtggctcggcaaaaaagactgagcccggtgcattgcgcgccgggctttaatccgcgtcttcctcaagcacccatgggagcaagagtgaaaagtcgagatggataatagggtcaggaaaacccttcggtataaaaaatgttgtactcggcaatgaaaacgaaaagcggatatctcccgccctctcgatatgaaacttcggccagccttccctaagcctgccgacaatcggatagctgcccgcatagtgatgcaggccgttttcctttccatgctcccccaagtcgtgacagacagccggacgaatcccaaactgcgtaaacaatcttgttatctcggcgggaaggagattcaccgcctcggaaaagttccggcagctcccgcaatcgcaaggatcaggccatgatttttcgtattgttttctcgtttccgccgcatctgcttcaatgacccatggcccgatttcaaagacggtgaacatgatgaaacctccgcgtaaacatgaaaaaccccgagtcttggttcggctcgggactttccatgtcctgattctgtatcatcagtttactcagtacaatcgcataatagtgcaaatatttataaagttcacaaaaagttcacaaattatttttcttccggaagcagacctgttttcaattcatcggatgaacgttcccagagcccttggtcatgcttctgcagaaattcagcaagcacccgctttgagctggcgtccattttgtccacgataatgcagcgcttcattgatttatccattaaattcacatgctccggcaatgacttatagcctctgcggatacttctgtccacggtcatttcacaagccgtcacacccgcgtaataagggccttcttcttttctgtcgatggtgacccacacgagccagtacggttttccgttcggcacttcatctttgttcggcaggaatttgatgcctttttcaacgacactgcgggcatgcatggcgccgatgtcaacgaaggcttccttctcttccacatcgacaaataccggagaaatattgtcaaggctcagcgccccgacgccaaaaccgccatgtccgtcggtcggatcacttttaataatattaaatccgattgttttcttctttttttcttccatgaaaataccctcctacaaaagcggttgaaatataatggcaaataccttgagaatccagtctctcccctcgcttaacagcggccacacgacataggagccgaccggtgtcacaaacagcacgagaaacacgataatcccgtagctctcaaactgagtcattttggcgcgcacccgcggcggcacgagatcctcaataatccggtagccgtcaagcggaggaagcggcagcaggttgaataaacacagcgcgagattcagctgaatccaaatagagaaaaagcggtcaagccccatgctgaatgcagaaagcagctccattccgtaagcatgcatcaacactagcaaaaagaaaccgataaaggcaagaagcaggttgcttacaggcccggcgacggaaaccagcactcccgccagccgcggtcttttaaaggcgcggcggttcaccggcaccggacgggcccagccgaaacccgcgaccaaaattagaatcgttccgaaaacatcaagatgtttaatcggattgagcgttaatctgccctgcctcgccgcggtatcgtctccgaaccgatacgcgacatgcgcgtgcgccagttcatgcatcgtaaatgccacaatcagcgtaatcacgacatagggcataagctccagcggataatataaaaatctgtccaaatgtaaaaatccccttttttaaaaaatgcaagattgtccttcattcagtatactataagtgacctctcttccaaagtgaggaaacgataaaggaggatcagcaccatgccgctcgtaaccgttaaaatgcttgaaggccgcacagatgaacaaaaacggaatctggttgaaaaagtgacagaagccgtaaaagaaacgacaggcgcagccgaagaaaagatcattgtcatgattgaagaaatgagaaaggatcattacgccgtcgccggcaaacggatcagcgatacggagtaatccttgataatggccggcgctgctatgtcaggccggcttatttcattactttttcaacgaggctgaaaaaggtattcttttcttcttctgtcaatgcttcgaacagctcgtcaatgagcatctgccggttttcaatcatttgcatagccgccatttttcccgattcggaaagcgtcatccataccgtgcgtcggtcttcgttatttctcgacctttccacgaaaccctctttttctaaatgattcagagcggttgtcgtggcggaaggcgataatgtgacttcctgcaatatatctttaatcgtgcacgtgccgtgccggtaaataatcctaagaataaatcctctgatattgtttatactcttcggaattgtcgcctcatcaagctttttcgtgctctttaaatatttcgtgagcgcgtaatccagtacatttgcttgcaatatatcatgctccatgcagaaactccccatttcaagatgcatccatcatcatttgattgttttttattacattttactgatacctcgcggggaaagtcaaaatttcggccggaaagcccgcaacttttatcctgccttatacagactattatctcctactttttcacccatcccttttatgcaatgctggttttatagacatgattcaggtaaaatcattaagggtgactgcgtttgacggaaaggataatctgatcggatgcggcagacaatatgactggaaaagaaacggaacagacggggaaacagaacacaggattgtcgattacacagaagatgtgacacgggtaaaagccaaagagcccctcttggcttttgcttttggatggagggatgcgtgttgcggaatatcctacaaaaaaaagacatcacccagctgcttgaacaaagcagaaacaggcagactgccaaaacgatgggtggatttgatttaactttactgggcatcggcgccgtcatcgggacgggcgtcatggttcttacaggcattacggccgcgaaaaacgccggaccttccgtaatcttttcttttatcattgcagccgttgtctgcagccttgcagcattatgttacgccgaaatcgcttctgttctcccggtttacggaagcgcctatatttactcttacactaccatgggagaaattgtcggccatttaatgggctggacgctcttatccgtttatatggtgacggcgtcggcggtggcaagcggctggtcaagttattttaataatctgttagccgaaatcggcatgcctttgccggacagtctgctgcacgtgccgagccaggggggcatcgtcaaccttcctgccatcatcattactctattaattgccgtcgttctgtcacgcggctccaaggagagcaaaacctttaataatataatggttctcgtaaaaatcggaattgttttgctgtttatcatcacaggaagcttttttgtaaagccgggcaattggcatccttttatgccttttggaatcaaaggcgtcattacgggggcttctgccgtcttttttgcgtttctcggatttgacgcgatttccgcttcggctgaagaagtcaaaaaaccgcagcgcaacctgccgatcggtattatcggttcactggtgatctgtacattggtatacgtcatcgtctgtctcgtcatgacggggatggttccgtattcacagcttaatgtgccggaagccatgtcttatgtgttgcagtctgtcggacaaaacgcggtggcgggcgttatcgctgccggtgcggtgatcggactgatggccgtcgttcttgcccatacctatgcggcgacccgtatatcttttgcgatggcaagagacggaatgctgccgaaagtctttaccattgtcggaaagaaatcgggagcgccgatctttaatacgtggctgatcggactgatcagcgcatgcatcgcgggttttgtagatctgaaagagctgtcggatctctcaaacatcggcgcgctattgacatttgccatggtcagtctgtccgtgctgattctgcgccgcacccataaggatctgccgcggggatttaaagtgccttttgtacccgttctgccgattttggccattatctgctgtttgtttttaatggtcaatctgccgctgaaaacgtggctttattttgccgtctggctgatcatcggcgtcatcgtttactttttatattcgtacaagcacagcaaattgagacaataaacaaaaccaggcccgctttatcgcggcctggttttttcatcaaaaaagacgaaagccatcgcctttaacaaatgtgtttcagctcttctatgtagtgaagcgcctcatcatattcttcatccgtatatttctgtttgctttttatcgtaaacactttctctttcttttcctcagcttcaaggccgtcaaaatacaaaatcgtagacaccagctccagaaaccgggatgagcggctgttgacgctgtcgatgtacttcttcatatccggcatcgtaagctccgcatgatgtaaaaactcggctcccgtctccgtcagcgagtaccggtattgaaagtagccgccctttttttccttcacctcatccagaaacccaagattgcacagctcttcaattcgaagcgtcagttcttcggaatacgggccgtaaaaatgaaaatcatatttttcgtagaaaggatactgcattttcttcgcgatataaatgattttctgcagctttttccgcccgatgatttctccagaatccgagaacaccttcatcagttttgcatgttctttcaacaaattcccgacatctccttttccttctttaccaaaatccttctatgtcagtcccagcagctgccggatttttaattttgcttcagggttttctgaatcgtcacaaatgaggtccatcggatagtagagcttatggtccgtccggcgtttgcccgaaatggattcgacaatggcggactgcctggacagctctttgatctggccgttctgcgttaacaggtgaatcggcagacgctcctcctcttcacccggccggtaaaaatcatacggcagatccgatgaagaatcgaccactaaatagtaattgggatcaattcccgcctctttaaacagagcggtcagttcaaaataagccgacatttcctcattggggttaaattcggcatattgaaacagctggcggttaatgaagcggcggcacaagtcggacagaatcgggtcctcttcttcttcccaagcctggaaataatataaaatgatggcttcatcaagcttcagataatccgcaagcgtcagcttcccttcaaaaatggaataaaaatgaacgggagcatgagtgaatatatacccttcttcatggagctgcttcgcacggtggagaattttcgtcaaaatgacttcagcgcttctcgtcacgggatgaaaatacacctgccagtacatttgatagcggctcataatatagtcttcgacggcgtgcatgccgctttgcttaatgacgatttggtcctctcgcggacgcatcacccttaaaatccgttccatatcaaaatgtccgtagctgacgcccgtatagtatgcgtcccgctgaaggtaatccatcctgtcggcgtcaatctggctcgaaatcaggctgaccacctgtttgtttttgtatgttttggcaatgacttcggcaacatcctgcggaaatcccggtcccgcctttctgagaacctgattcacctcggtgtcgccgagaatgatttccctcgtatagtcttcatgatccagatgaaaaaccttttcaaaggaatgcgaaaacggcccatgtcccaaatcgtgcaaaagcgcggcgctgagacagagttcgcgttcattgtcatcccattcaggacgccctttaaaaacatcatcaaccattcgtctgacaatctcatagacgccgagagaatggttaaaacggctgtgttccgcgccgtgaaacgtcaaatacgtcgtaccgagctgtttgatccggcgcagccgctgaaattcacgggtgccgatcaaatcccagatcagcttgtcccgcacatgaacatagcggtgaacgggatctttaaacactttttcttctgataattttccgtttggatacgccatcgtcattccctcttttttttagccgtgattctattatatcggctctgtaatttgaaaacatccttgaatttgtccggcgttttgttccagttttccgtcattgattttttgaagcaaaaaagcctgacccatcgggcgaggctgtcgtaaaatacacatttactttttgatcttctttttcactttctcaatcagctcatcctcagtcggcgccgacagcgggcggttgtttacgaaagcaaacgattttttgcgtccgggcccgcaatatgactgacatccgacctccacttttgcatccgggtcagcttctttcaaacgcggcagcaaagtcttaatattggtggcctggcaatcatcacacactcggaattcattagccatgatgtacgcttcccttcattcaatgttcctctatgttaaatcttaattttaaaaacgaaaaaaatcacatcacatctcattgtacaaggattcatcttatcctgcaaggctctgcgtatctctcattctttcagccaatttgtataaatattttccaatctggacattctaataccatcaaagatattgggggttgagaacattgacaaaacaaagacaggacgcctggtcggaggaaaatgacctgctgcttgcggaaaccgtgcttcggcacgttcgggaaggaagcacgcagctgaacgcctttgaagaggtaggcgataaattaaacagaacgtcggcagcgtgcggtttcagatggaatgccgtcgtccgccatcaatacgaaaaagcgcttcagctcgccaaaaaacagcgcaaacagcggatgcgcgcgctcggaaacggccagccggcaaagaagaaactattatatcagccgcctgcgccggatgcggacatcatgcaggaaaccgcagccgaagagacggttcaaacggaagcgccaaaagaggatcggcaagccgtcatgtccggcgaacatatgccttatgtcgatgaaagcttcaaggaagagttagctagtttatcacatttgctggcgcctcagcagccgagccaaaaggcggagcttacaatggcagacgtcattcaatttctgcagagctatgaaggaagcggaaagcaaacttccgccctgcaaatggaaaatgaccgtttaaaacgggaaaaccaagaacttcagtctaaaaccgagcagctggaagcggccgtcgaaaagcttgaaaaagatcaaaaaaccattcaggaagactacgaaaccttggtgaaaattatgaacagagccagaaaactagttttatttgaagacgacgaacatgcctctccgtcctttaaaatggaccggaacggcaatttagaaaaaatggccgaataacggaaaaacccctttccttgtcatggaaaaaggggtttttaccatttgtcaatgacgcgcatcctgatctatattaatgtaaacattgttcaggaggccttcttcccgcaaaggctgcgcatctcggtccccgcccgcacataagcataaagattcaattcctcaccccaaatggttcttgggaattattgatcgattagctactgtgcaatacactgtatagagaatacaattattagatatgatgggaatgatagtaaatgagtagccaattacgaaaaggagcgttggaactttgtgtgttgtccctgcttctttatgaagatttatatggttatgaattaatcaagatcataagtgaaacgttccctgtatcggagggcaccatctaccccatattacgaagacttacaaaaaataactacctaaaaacgtatacagcagcttccgatcaaggcccgtcacgcaaatattacaaagtaacagaagaaggcgccttatatcatcacacattaaaatcggaatggcttgacctgtccgaaaaagtgaacagcatcattaaggagggaaaatgaatgtgtaaagaccaatatttaaaacatctccggcgggaaataaaagatctgccggaacttgagcaaaaagagatactcgccgatatcggcgaaatattccaaatgggcggcgctgaaggaaaaagcgatgaacaaatcgccggcaatttaggaaaccccaaaacacttgcgcgcgccttaaaagcggatattttcatcagtgatgccgaggagcagaaaacatggcgctcctttttcaaagcattcggcctgatgctgggtatgggcatgttcaacttcatgtttatgctgacaccgtttctttttgcctctgttgcggtgttaagtttgatggcaatcggcctgatgctgatgaccggatcattctttctccttgtaaaagcgccgcttgtaacagccatttttaacggatgtatggttcttggagcgggtatggcggtgtttatggccggatttgatctttcgaaactgatattccgcatctttttgcgctatttcaaatggaatgtcagcgttgtaaggagggaaaccattgaatcgaaaaatgtggtatagcattgctctcattttaatcgctgccggcctgatcggaagcatgttcttcggttttgacggcttttaccctaaatcataaggaaggtgtgcaaatatcatgactgaaccagccctgatattaaaagatgtctctaaaacaatcaatcatacccctattgtacagtcaatttctttcgatgtgagaaaaggcgagatattcggccttttagggccgaacggctcaggaaaaaccactattttcagaatgatcgtacagcttattaaaaaaacagaaggagccatttcattcagaggcagaccggacagcgactttgaatattttatgagacatatcggggttatcattgaaggcccggatatgtatccgaatatgaccgctttgcaaaacctaaaatattttactaaactgcgcagcacctcgctgcgaacggatgaccttatgaatacccttgcaaaagtcgggctagagcaggctgcccgcaaaaaagtgaaacatttctcattaggtatgaaacagcgcttggggctcgcttattctcttcttcacaatcccggattattaattctggatgaaccgatgaacggcctcgatcctaaaggaatgaaagaattgcgcaccattctttccgatttagcgaagcaaggggtttccattttattatcaagccatttattgtcggaaatggaggagatttgcgatagggttgcctatattaaaaagggacggattttaggaattgaagacatgaagaacagacatgaccttggtcagaaaaaactgtttaccgtcacggtcgatcatccggcaagggcgaaagaaatattagagcaggacggtattcttcaagtacagcaaaaagacagccgcatcattgaattggaagcggaagaagataccatcccgtatgtcattaaatctttggcagagaaagagattctgatttcccgcgtttctgcaagaactttgtcattggaagagaaatacatgatgattacagatcaggaggacgcggtatgagcatatttcatctggcgcagaacgaattcataaaaataacccggaaaaaaggcacacttttatctctttttttcctgtttctcatcgttttgctggccggccttattatgaatcatgagttagatgcttcctcggataacaattggaaagaacggcttctcgccgaaaaaaaacaggaagaaattgataaaccggctgaaacgacaggcgtttattattctgctgatgttaagaataaagactattatttggagcataacatcaacccctatgaatggaacggctggaggtttttcggcacggttacttcaaacgggcttgagattttcgtaagcttaaccgcgattttaaccgtcagcgggattgtttctaaagagtttgcccttggaacgattaagtttatcgctacaagcccgaaccgaagatggcggattttaacatcgaaatttctggcctcccttctgtttaccggtatgatttacttattttactgtgtgagctgtttgctgatcggcggcgtgttattcggtttttccaatgcttcatatccgctcgtctatactcatttaaatgacagtctgtataccatcagttcaatcaaagcatccggaatcattctgcttttgcgtttcatatcaattataagcattgtcaccattgcgttcactttgtcagtattgtgcaaaagccaggcgctctccctttgcttatcgattttactgctgtttgccggcagtatattgggcggaactgatttgcttgcccaatttacatggtataaatttacgctctttccgcatttaaatctcgttgcttatgtaaataaaagcgcgggtgatgcgatttcaacgttaaacatcccctattccgtgacggttatagcgatctactttcttatttgtttattgatttctttttccgtctttcaaaagagagacattacagcatagacagagaggcggcggcataatgagcggacggcaggaaatattgacggtccagcaatttgccgctgaccgcccctcgatccatcgctaatggattcaaataaccgaagctcccgctgcttcgctgctgaaagcgtagaaattcccccccttcccgtataaaaagcgcctcatcgaatcggagaaatttcataatggctgtgtattttgcaacggcgtcaatgtgatactttctgcactcggctaacattaaacctgaaaaagcaaagtctgatgttttgtaccattccgtgagaaaaggctgcaattcattcatttgcaaatatgtgacggcataaagggcatccgcctgttcttcctgcatgccgcccggtgccatgagcaaatcggcctcacgtttcatcccggtttctaagaacacgatcagttcttccggagtcaccgccccaaaataagcccctaacaccatgaggatcatagaggagggctctgatttcagttcctcttgtaaaccgcgggccatttgttcaagtccgttatgaaaaaagatgctttttgcggcatccatcctgcggtacacatgatacgcatacgcgaacaggaccggatggcattcgtgtgttttttctccgaaataacggtctaggaatagaataacttcttctgtatcctttctgctttcaaaatgatgacatgccgctaaaccgcaaaacaggtgcatgagatcatctgcttccatttcttccggctgcagctgaatgttcttccaaaaacccagcagccattcttctgttttttttatattaaaatgttccttgactatctgcatgttccacactccagattcagaatctcaatcgccggcagaagagccggcgcacaatgaatggatggattctcgttatttatatgatgaagagccgcttgacagccataaaaaaatggatcgatacacgattggataaataacatattgcacagctgtttcatttttcggctgccgagacaaaacacaagccatttttgaatggacaccttcaagccgggatgaagcagatgctctccctcattcaaatgaagaagacagtactcgacaaactccagctcgttttcagctgttcttttccatgcgtcatggagcaaaggctgaaacatcgaattcttgtaaaagcgcactttttcatggtcagttgacattcccagctcgctcagcaaaccgacgaattcggcgtatttaaaataaggccattctttttttataagatagccgttttgcaatccgtgacgtatgacctgatcatccgaatctattccctgcttctttttataagcttttgccgttaaatagatatgaatcaactcattgacaatggccgtgttacagtgaaacagatcttcccagcatgacttatcaacgaaagcggaggcaatcctttcagtatgttcttttacagcggaagaatggctcgtcttcctgtagtacttgcagaagccggcaaacagctgaatgctcttttgatccggaagcgattgttcagcaaaagataataaaaattggtctgtctcttcagctaatctattcaagttaatcgttcctttctgctctaagacaggcatgcgcggcaccagcggcgacaagtgttgtatgatagcaatgtttgaacacatcttctcttcgctgttcacctgtcaaaccgggtttatgttgataggtgatgctcgggacattcccctctttcattcggccctgatagattttattccaggctgcttcatagagcggtttatggttgtccttatccatgttgatatgtaaaaaagagctgcacatcaataattcactggtaatatctaaattctcaagacagatatagatcccgagaaatttcaggaccttttcttttaacgacggcagatgatactctttatctgtaagcgaagaacatcccatgtctgttatataaaaaatcgtatgagtgatgctgtacgcatcatgatccgtcatatatgtatttgggatatcctgaccagctgctgtgcagtgatataagtcagaaaaatccgttatttccgaggttacgcctgctctttgcagactgtacttcagatccattttccgaaagggaactttagcaaggctgcaatcaaaacgcgctgccgtgaatttttccagctcccatatcaccgaagcccgtgacgggtgatcagtcaaggtaagaaattcacccgcaatagccaatccggcgagaccgtccggatcaaaatgaataaattcttcaagctgatcattacggagcctttctgtaataaactccgttaaaacagcaacttccttatcatctgcctgatttctgatcaggtaattggtaagaaaaatgagttctataaatgttttaaggcgccacctgaaatcattcgctactttatgattcatatcaaaataatggatatttttaacaatccatgacagtgctccccgcttaatttctcttatatactcttgtgtcacactctcaccgcctcgtctcagatgtgtaggctccaaacagtgattatcctacttttgagcggctaaatcagagaaattcaaattcgggttttgattgtcttcttggctcggcactacaagcacccagccgctccaagcgaaagaattgcctgattgttccgcatctccggctaacaaatgtgtggggatcgtgattcttttttcttcttttatttttttaaagttcatatctccatctccttcagtttatagaattatttggaacctacataaatatattaatcaaataaggtatataatgtaaactagttttgatataacgattctttttcactataactaaatagtatataattaccaaaaacaaaaaaagcccggacttagtccaagctttcctgcgtgccgaacaccttctcattccgttccagcattcgggtcagatttttttcaaataccatttcctcttccggcgataatccggctgcatacaggcgtccgctgagttccttcagttcagtcaaaagcgccagcattaagtcttgcacggtaatgtccgtttgcagcaattcgcttaatgaagccatcgtttcgggccggatatcgggatatacgccttttgtatcgttgcttttgtcttttaaagcggcttgatagaaacgtctgatcagatcggcgcgttcgcttccgcttttatcggcgcagaggtaaatctgaaccgcggttccgccccgcaggcgtctttgtgagattcccgcgaattttcggccgccgatgctgagatcatagctgcccggacagtacgatcctttaatttcatatgcttcaatttcggcatggtgcggacgcagcatccgccgcaccagctctgtcatcgcctcgtagcctctgtcgatgtcgatgccttttttctcgtcttcaaaaataagcgagatattcaatacgccttcgtccagtacgacggcgaggcctccggaattgcggacaatgacacggtagccttcgtcctccagcaatttcacgccgtcctctaaaaacggcaggcgcgtgtcctgaatgccgagcacgatcgtccggtggtgcacccaagagcgtgccgtcgcaggcgattcccctttgcctacggaggcgcacagcgtatcatccattgcgaatgactgcttcgcatcaaaataagggccgaggctggattggtcaatgattctccagctcggctgcatcagtaaatcaatcggttgctttcccatctatattaaatccctttcgtcataggctttccatgcatttattatatcactccgcttgtgatgattgaaattggcttttcaaaagagcgatgaagatttctttgttttttgtgttctccataatggaagattggatgatagacagtttccgttttaaggagaatccttttatctcaagcacggaaatgctgccgtgaagcagatccttttgcagcacgctttttgacagaacggaaagacccattccgctgatcacggcttctttgacgccctggttgctgctgatcgtcatcatggatttcggccgcagtccgtttgattgaagcacgtggtctaaatattccctcgttcccgaacccttctccctcgtcacccacgcttgattttgcaattcggcagccgggatgttttttctgccggcgagcgggtgtccgttcggtgcggcaatgcacaattcatcctccataaacggctgaatgtccagctcgtttttccccgtatgcccttcaattaatccgatatcggcttgaagcatccgaaccgcttcgctgacctcctccgtgtttccgatcatgacgtccaggttcagctcgggatactcgtcatgaagctttgcgagaagcggcggcagaatatattcgccgatggtaaagctcgcggcgattttgagcttccctttgacataatgatgatgggcgtaaatttcggatttcgcctgttcgtacaaaaagaccatctgcttggcgcgctgatagagaatgtcccccgtcggcgtagtcgtaaagtgcttcggagagcggttcagcaaggcggtttgaaattctttctccaggtttttaatgtgaaggctgacgctcggctgagaaatcatcagcttctgcgccgcctttgtaaagtttttttcttccacgacggcaatgaatgttttcagttccccataatacaaaaagcatcgcctctaatcattatttttcctaatcgtttagatcatataaatatattttactaatgattaagaccgcagtaaagtggagttatcaagataatgggaagtgactgagatgaagatggtaaaaggtgtttcagttaccgcaggaattgcgtttgcggctttctatgtcagccgcctgccgtttttgcaaatgctcggaatgcttgtccttgcaatgctgatcggcatgctctggcgcgccgtattcggacagcgggcggcattagagccggggatcgcgttctcaagcaaatacttgctgaaagcaggcatcatcctgcttggcatgagactgaatctggcggatatctatcatgcgggctggcacgtatttgcaattgccgtctgctgtatgatgtttgcgggtgccgttgtatacggactgtcccggctgttccgtatagatcagacactcagcacgctgacagcctgcggcacagcgatctgcggggcggctgccattgccgcgatcgcgccgcagatcagatcaaatgaaaatgcagccgccatcagcgcggccgccgtttcgttattaggaaccgtttttactgttgtatattctcttgcttatcatggattgggcttttctcctgcggcttacggagccttttgcggggcaacgcttcacgaggtggcgcatgcggcggcggccggcagcgccggaggaaaagcagccgtcgagatggcggtgatcgtcaaactgacccgggtcgcgctgctcgtcccggccgcattcatgctcggaatgcgggcgcgccgcagcggaaagtcaaagacggcttctgccgcttcgctccccatcccttggtttatcttcggatttctcggaatgagcgccatccatacatcaggcgttatttcagcctcgttttccgcgtttcttgttcaagtgtcttatgttttcatcggcatggcgatggcgggtctcggtttgaaagtccatatatcggcgtttcgtcataacggctggcgggcgctcgcagcaggcttgatcggttctctctgtttgtccctgttcggctgggccgcagtgacgttttttctataaaaaaagccggccctcgtaaaggccggcttttgcggattacagcgcttgagcagccgtaattaacgcaagattgtagacgtcttccgcattacatcctctggaaagatcgtttacaggcatattcaatccttgcagaatcggtccgaccgcttcaaagccgcctaagcgctgagcgattttgtagccgatgtttcctgcttcaaggcttgggaatacaaatacattcgcgtctcctttaatgtcggagtccggcgcttttttctccgcgacagacggcacaaatgcagcgtcgaattggaattctccgtcaagcgtaagctcaggcgctttttccttcgcaattttcacggcttcagccactttgtccgtctcgtctgatttcgccgatccttttgtagagaagctgagcatggcaacgcgcgggtcaatgtcaaacatttgagccgtattggcgctttcaatggcgatttcggcaaggtcctggctgtcaggagaaatgttgatcgcgcaatcagcgaacacatactgctcgtcaccgcgggccatgatgaagacgcctgatgtttttttcacgccttcttttgttttgatgatttgcagtgcagggcgcaccgtatcagcagtagaatgtgcagctccgctgacaagtccgtctgcgagacctttgtagacaagcatcgtgccgaaatagttttcgtccagcaaagctttgcgggcctgttcttccgtcgctttgcctttgcggcgttctacgaaagcctgaacgagttcttccatgccttcatatgtatgcgggtcaaaaatgtccacgccgtcaagcgtaagatttaattctttcgcttttgcttgaatgtcttctttattgccgactacgatcggctttaataccttgttgcccgccaagttgttgaccgcaaccaggatacgttcgtccaacccttcaggaaatacgattttcacatcttttcctgcgactttttcttgtacttttgtaaataaatctgccacgatataccctcctctatgttgacaaaaaacgcttacttttacagcatactcttcttccagctaaattcaaataaccaacttctattatagcgctttcaaaaagaaatcttatttttctaactaatttaattgacggtttgtttcacggcttagtttctgacacaaggcttcggattattcaaggtttctccacagccgaaacggttaaactgtgatatagtgaaggcatcaatgtaatgaaaagatataggagtgaagatacatgagtgagcagcaaaaaacgaacgaagccgcccaaacgcttgacggctggtacgcgcttcacgatttccgcacaatggactggacgtcatggaagatgttatccagcgatgagcgcctgtcgattattcacgaatttacgggactgcttgaaaaatggggcgtcgcccaaaaagaaggcaaaggctcgcaaacgatctacagcatcgtcggacagaaagctgattttatgctgatgattcttcgcccgacaatggaagagctgaacgaaatcgagcttgaatttaacaaatcaaagcttgctgaatttacaatcccggcttattcttacgtgtccgtggttgagctgagcaactacctcgcaagcggagaaggcgatccgtatgaaaatccgcatgtccgcgcccgcctgtatcctgagctgccggaagcgaaatacgtctgcttctatccgatggataaaagaagaagcggcaatgacaactggtacatgctttctatggatgaacgcagaaacctgatgagaagccacggcttgatcggacggagctatgccggcaaagtcaaacagattatcacgggatctgtcggttttgacgattacgaatggggcgtcacgctcttcagcgatgatgtgcttcagttcaaaaaacttgtatacgaaatgcgctttgatgaagtcagcgcgcgctacggcgaattcggttcattttttgtcggaaaccgcttgtctctcgacacgcttccgaagtttttgcacgtgtaagacccacccgcctgtccggcgggttttttctttgtcagaatttaaataaaatttgctatttttatcatttttttttacgatgtaaaggagataccattttggtaaaggggtgcagacagttgtcaaaacgaaccgcgtttattatgggagccagtcaggggatcggcaaagcgatcgctctgaaactggcggacaatggctttcataccgtcattaattcacgagttcccgaaaatatcgaatcggtaaaagaagagatcctcgccaaacatccggatgcgggcgtcaccgttctggccggggatatgtcggaccagaagacaagagccggcatttttgaagagatcagatcacaatgcggacggcttgatgtattgatcaacaacattccgggcggctcgccggatacctttgaaaactgcgatatagaggatatgacaaatacctttacgaataaaacgatcgcctatatcgactctatgaaaacggccgcagcaatcatgaaacagcacgaattcggcagaatcattaatatcgtcggaaacctatggaaagaacccggcgccaatatgtttaccaacagcatgatgaacgccgctttaattaatgccagcaaaaacatcgccattcagcttgcgccttttcacattactgtcaactgtctgaatcccgggtttatcgccacagaccgttatcaccaattcgtgaagaatgtcatgaagcaaaacggcatttctaaagcggaagcggaagaacggattgcctcaggcgtcccgatgaagcgtgtcggaactgcggaagaaaccgcggcgctggctgcctttcttgcctctgaagaagcctcctatattaccggacagcaagtatcagccgacggcggcagcatgaaaagcatataataaaaacatcccgctctcagcgggatatttcttgtaatgaaggaaaggacaaaccgagcttttgaatccgcagcacgaattcccttaaatcaccctgttttgccaccattgatattctgacataacgctttccgccgctgccgaaaatctcgccgggcgtcacgacaacatgggcatgctccagcaaatagtccgaaaactggtgtgaagactcgaattcattcggaatttcagcccatacataaaatgtccctttcggtttttcaatgctccagcctaattccttttcacataacgccgtgaaaaagtcaatccgttctttatatgtgcgcttcagacgcccggtatgctcaggatttcctgacagcgccgccgctgccgcctgctgaagaccgccgaacatgccgacgaagacgtgatcctgaaactcattgaccgcctgaatgattttctcattccccacggcaaatgccattctccagcctgccatattgaaggttttcgaaaatgaataaagctccgcgccgaccgttttcgcttctttcgcctgaagaaagctggccgggttctgatcaaattcgaacgcgccgtatgcaaaatcgtgaataaggtggatgtcatgtttttttgcaaacgctgccgctttttcataaaacgcctgatccgcagtcgcgcccgtcgggttattcgggtaattcaaaaacatcagcttggcttttttcaggacggcgggatcaatccgctcaaaatccggcagatagccgttttccggatgaagcggcatctcatgcagctccgctctggccattgtaatgcccgataaatactcagggtagccgggattcgggactaaggcgatatcgccgggattcagcaggcattgcgtcaaaacgtacaaaccagctttccctccgccgaacagcgcgacttctgtctccggattgaccgataccccgtactctctctcataaaattccgcgatggcttctttcagaaacggatagcctctgaacgggccgtatccgtgatacgaaggattcagcgcagcctcccgcaatgtttcaacgatatgcggcggtgtggggagatcgggattcccctgcccgaggttaatgatctgggctcccgttttctccatctcttttaccttttgaaaaacgagcgaaaattcctgtttcggaagtgtcttgatgacgtcggacggtatgatttccatctgaaaggctccttataaatgaatttgctctgattcgttattccgttctgaaaaggatttattgaccagttttgtatgcagaaacagcccgctgaccaaaaggacgataaacgccatgatgactgccgcgtctacaatgttgatcagcatggaaccgacggcgatgcacaatccgatggaggcctccgccaccgaaaaaatccggccctgaatctggttcgccgcgttctcctgaactttgaccttcgccagcacttcaccgtattccattgcgataaagaaaagaatggcggcaatgactgacacggcgaaaatcggggtaaacaaaaacagcgcaagcgagacgatcgataacactgtaaaatacatcagccctttattgttgttaaagccccatttgctgacaagagcggcgccgataaagccgccgaagccgatacagaacgtcaggatgaaattgccgatttcaccgtcccctaaaaagcggctgacaatcgggaaatagctgtagacgacaccccacaaaagcgccatcgtaatcatcgtgaacatggcgtttaacacaaaagcatttgttttgatttccttcaggccttctttaaacgactgaaaagcttctctcacgttttctgactgaatcggcacgtattgaagcttaatgcggctgatgaaaaacgcggagacaagataggtcaccccgttaaacgcgacggcaagctccacagaaccgcctaacagaaaaagtccgccggctgcagcgccgacaataatcgaaatcgtcgtggcttttgcaaacaaagtgttgatatttttaatatccgcttctaaagacgacatgaccgcgagacgtgccgggttaaaaaacacgccgcttccgtaagaaacaaacagcagcgccagaaaaagcagcggatattcgcctttcgggagaaatgtcagccccaaaaagatgacacctctgatcacatccgtccacagcatgattttcaccctgtcgagccggtccacgagcacgcctaaaaacggctgaaacaccatcggaatactgcggaccgcgatgacgccggacgtcacccagtagtcgtgatagtatgtagacaaaatgagcagagccgggagaacgcaatagtctcccataaacgaaagcgcctgcccgaaaagcaaatacttagagttcggtttcagctgtttcataccggtaacgcatactttgcagtcagcttcgcctgctgctgaatttgtttgattgattcggccacgtcacccgaattgcttcctttcagctcgaacgccgcaatgctgttgaacgcttcgaacagccgcagatccacggatgtacccgcctcggccgccgagaaagaaacgatttcggtgtctccctttaagacgccgtcgggaatgtcaatgctttcaatgacgaaatcgacagccgtctcaggcagctggccgttttctttgaaatgctgaggatacaagtggcagtcggcaacatagcatggctcctgctccaataatcctttcggcagatcgacttcttttccgaaacagagaacatccaataacagctgcgccatatcgacgccgaagacctttttaatattcggaatcatgttccagcccgcaaatcgtgccgctgattcaatcagtccggcttcccggtttttcattaatttaatctctgtatgtgttgcgcagttttcgaggccgagtccttcattcgcctttttggctgcttcgacgattttccgcttcgcgtcatcatccaggatggacggcgtaatatgcgatgtctccgtgaatccgatttgcggtgttttatcatgaattgcgacagggaagtattctccgtcggccatgatgccttctatgctgatatagtcggaataaccgcttgtttcgtaccagtcgtcatactccccctgcaaaaattcttccgcgataaacggcgcttcaaacgtgaccgctttcggtacgttgatcgacttcaggtattcattgactctgttaaattcggcttctgccgtttccctctctttgatgagcgtcacgccgatggagctcgccagatatgtaggcttcagaatgagcggcgttccgatttcctgaagtgcggcgcggaaatcttccagcgtcgtcacccgtttgtttttgatagacttgacgccggcccggttgaaggcggctctcattttgtttttatctctggcattttcagcggcctgtacgcccgctccccgcaggccgagacgttcacacgcttttgccatcggagcgataaacagttcattgttggtcgtaatggcgtcaaccgcgaacatgccggccaccttgacgatttcttcgactacttcttcctcaggtttgtcatgatcttcatgagcccagtaaatcgaatcgggatgctcaaaatcagccagactcttaaaatagtctttatcttttatgaccgcgaccgagtatttttcaattaatgccgcatgagaggctgtaattgcaaaaggtctcggaataaagctgacgaggttgtatttttcggctgcgcttttgtaaaacatatgcggcgggcatcccccaaggtcagcgataaccaatactgtttttctctccatatgtaaacactccttctctattgtgcggtgtatccaccgtctgcggtgatcgcgcttccggtcatatagcttgataaatccgaggcgagaaacagcatgacgttcgctatttcttcaggcttgccgagtctcagcagcggattgactttcgctttttcttttttgatttcttcaagcgtgccttcgttgttttcaaggaacgacttttcattcaaaggtgtgtcaatgattcccgggcacacgcaattgacgcggatgttgtgtttggcgtaatcgacggccatcgaacgcgtcagctgcaatacgccgcctttagaggcgttatatgcgggaatgtcgggccatgcaacgactcctccgacggagcacgtgttaatgatgttgcccttgccgcttttgagcatatacttgagcgcgtgcttgctcataagaaacatgcccgtcagattgacgttgagcaccttgttccaatcgctcagctccatctcatgaatcggcgcgacaatttcgatgccggcgttattgattaacacgtccaatccgccgaacttgtccgccgctgaccggatggcgttttgacatgccggctcatctgtaatatccgtctgcacaaaatgcagcctgtcattgttttctttcctgatcatcgcttctccctgcgcctcatcaatatccgcgacgaccacattcgcctgctgattcagaaacgcctgaaccgcggcataaccgatgcctgatgcgccccctgtgatgaggacggttttatccgtcaggttcatgactctttcgcctctaattttttcgcttttgctctgttatagcgcggagggaaaaagatattgactgattttgaatctttttcaaatctgttgatggcgccgtgatcttctctcggatcgcagaaataagctgtgccgaatgtcatatccactttgcagccttcaatggtcatatcatagccgccgccgatgcagatgccgatctgttcattgcggtgtttatggaacggcatttctcccccgttgcccggaatgttggcaagcatgatttccacccagtcttccacgaagaacgtgacttccataccgggcaataagtctctcgttttaaaaatattcaaaaaataatcttcagggcttgtgtaggtttcaccggctttcaggcgtttaatatcaatggcgatcacttcttgatccgtctcatttcttgcgccgtgaggcacattaggaggcgcgatataggctgattccagcgctgtcatctttcttgtgacatctccgacagtcatggacagctccccggaaacgacaaggccgatttggacttccttatgctgatgcggttccacgtttgtatgcggcggaacgtaagaaagcagaacttccgtatctcctctgacggacgaatattgtcttactccgttatcccattctattaatttaggcgtcgggaaataaagttcctgcaaatcttgttcagttttcatcatgaatctctccttttccgaataatgaccagctcatgggaatgcttttaaatgttttgacaaagtgaaggccgtacttttgtctggccagctcatttgtcagcgcgatgtcggacaaaccgtccttcactcttttcgcggctgcgctcgttgagttcaccagatcaaacgtgacatctttacgggtaaaatacttaatcaaattgataggagacgggtgggatacgatgacagtctgatcaagcatgtcatccgtatattcaaaaccgggccggacagccaggccgtacatcggggtgtcgcacctgaaaatttgcagaagctgcagatccggtctcatgtagaagtgcttaatgccgtcatacgcgtgaggcacaattgtgtattccagcggactttgaagcgttttttcaatgcacgattcaaatgtatcatgcagtgataatttgctgttcaccccttggagaagggtgaaattggtgatgaagttttttgctgcgtactcactgcttgtcccttcaggaccgagcgtgttgatcgtaatcagtttagatattgaataagccttgcttttcgtttgaatgctattatccaatataatcatgagcaccaaccaatctgttaaattttaagtaaatattatccatagatgttcaagctgtcaatattatttgaaaatattgataattattcctatatattagaaaacaccctatgacatagggtgttaaaattaacatttataaaattatagaaactttattttatcgatacaatgattggtcggcctgatgctcatatttcccataccttctgtatgcgaaaacgctgaggacaaagccgatgagggtgacggccgcacagataaatccgacagctgcatatccgtatccgacatagaccggacccatgacagcagaacccaaggtgacggccaaattggacgccaggctgtaaaatgccatgattttgccccggcggctctgtgagcaatcacttaaaatggtgctgagcaaggtcaccgtcaggctttgcatcaatccccagacgaataacccgatgaccaaaaacggcattgatgacggcgcataggcgagacaggaaagccatatgctgatcacggccaatgccgcgatcaaagagcgcattttccccgccttatctgcgatttttccggtgaacacgctcatggaaaaaccgattccgtacaccatgatcagcagccctgaagctgtatttccccccggcagcacgcggtgaagataggtgccgagaaaggaatacatgccgtaaaaaccgatcatgttgcaaaaagtgatcgtgaggtatacagggacacggggcaccttcagcgcatcccggaaagtgcctgcctgccgtccgttttcctcttctgttttatccccatccgccgtgctgcggcgcgcctcaatgaaaatgagcgaagcaacgaggacagacatgagggcgaaaatccaaaacgtccaccgccaatttaaaacgccgccgataaaagagccgatcggaacgccgaaaatcaaagcgagcgaccagcttgacacgatcagacccatcaccttgccgcggtacgcataaggcacacggtcgccgaccaccgcataagctgtcggcacaaacgcacccgccgcaagcccggaaagcgccctgcccagaaagaagaaaaagagattgtgcgccagcgcgcagatcaccgtgccggccgtaaatataagcagccccgtcatcaggctgagttcccgggaatatttatctcccagcggaacgagaagcggcgcgccgataaaaatcatcactccgtaaagactgatggaaagcgccagcacactgacatccgagctgaaagcccgcgctaaatccggaagcagcggagaaatcaccagctcttcagaaccggcggcaaatacgcctaatgtcaaagcaagcgcgagacagatcggaaatcggcgtttcgtttcgatgtgatcggtttgtttgctgttcatgctctttgaacacctcttccgtaaaacttttctaccttttgttgttttatattttagcatccttatgtttcattttacatttcacatgaaaactaattcttattttttatttacattcagattttaaataaaatatttagtttgtattcaataaatgatataaaatacgccgtccggttatgctatagtgatagaatcatttgttaaggtgggggtcatggaatgaataacgctgattcaaaggccgcccgcgcaggcctcggcatggtactgattctcggaacgctcgcttcattcgggccgctttcgctcgatatgtatctgcccgctttgcctgaagtggcggccgatcttcatacgacagcgtcacttgcacagctgagcctgacgttttgtcttttggggctggcggtcgggcagatcgttgtcgggccgctcagtgatatgatcgggcgccggaagccgctcattctgtcattgctgctttatacgctgtcttctttattatgcgccttcagcccttctgtttcgtttttaattgtcatgaggtttattcaaggattcaccggggcggccggaatcgtcatcgcacgggcgtccgcacgcgatatgtattccggaaaagaattgacggcttttttctcattactgatgctcgtcaatggggcggcaccgattttagcgccgattacagggggatttatccttcagtttgccggctggaaaatcgtatttgtcgtgctggcggtgatcggctgtatcattactgccgccgtgcttacggcgttgcctgaatcactcccgccggaaaagcggacaagcggcggactccgggagacgctgatgacgtttcgcggcctgcttggcgaccggatgtttatgggatttgcgctcagccaggcatttgtgatgaccggcatgttcgcatatattgccgggtcgccgtttgtactgcaaaacatctacggcgtatcggcgcaaatgttcagcctgctgttcgccgtaaacggtgcgggaatcatatgcgcaacccaaatcaccggacggatggccaaaacacatgatgaacggaagctgtttgtctccgggcttttgatcgccgtcatcggaagcatcactttgcttttatcacttgcgtttggtttaggcctgacggcggtctgcatttctttattcatcattgtttcttctgtcgggatcgtcacgacgacagggttttctctggctatgcagaaacaggagaaaggcgcgggaagcgctgcggctcttctcggactcctgccctttatcggcggtgcggctgccgctccccttgtcgggattgccggagaagaaaatgcctggccgatggccgtcagcattttcggttttgagttctttgccgttctatcctatgtgctgtcggccaaacgaaaaacaaagtaaagcccgccgctttttgcggagggctttttttcttatccggcagcgcctttttccgaagaagcctgctcacgcttcaggcgttttttaataccgaagtgataatacgcgtaacagatgatcatcagcgggacgccgcagtacagaccgatacgctggtcggggataaagatgagactgattaagataagaccgtaaaccgaaaatccgagaatcggcacgatcggataaagaggtgttttaaatgccaggtcttcgagatttcctccttcagcgagaaagcgtctccggaaaacgaattgtgaagcgcagattgacatccacgcgacgacggtaatcataccggagatggaaatgagccacacatacaccgtttcagccgcgaatacacttgtcagcagggataaaccggagatagcgatggtgatggaaagagctttcagaggcacgccttttttcgtcagtttcgttaaggaagcgggacccatcttagtttttgatagggaccacatcattctggacgaagcgtacagcccggaattcgccaccgacagcatggcggtcagaatgacaaagttcatgatatcagccgcatagggaacgccgattttatccagcacagccacaaacgggctctcgatgacgcctgccgtttggtacggcaaaatggacacgagaacaaacatcgccagcacaaagaaaaacagcgtccgccatatgacgtttcggattgagcggggaagcgtcttttccggattttcgctttctcccgaggcgattccgaccagctcggtgccctggaatgaaaaattcaccatgacaagggtaaacagcacggcttgggcgccgttcgggaaaagccctttgtccgtcgtaaagtttgacagatacggagccgtctgcccgccgttaaaaccgacaaagccgaaaaccgcagcgcagccgagaataataaacaatacaatggccatgaccttaatgctggaaaaccaaaattccatttccgcaaaactccgcgcagacagcgcgttaatggaaaaaatgacgacgccgaatacaaggcaccacacccaaatcggaacggccggaaaccaccgctgcattaaaattcccgccgacgtcagttcaagccccactgtattggcccagctgaatgcgtacatccatccgatcgtaaaacccgtcgacggcccgagaaactttgcggcatacgcctgaaatgatcctgcgaccggcatggcgaccgcgagctcccccaaacaaagcatcaccagatacattaaaaatccgccgatcacataagccaatatcgcgccgatcggtcccgcttcactgatcgtaaaaccggagcccagaaaaagccccgtcccgatcacgccgccgagggcgatcataaacaaatgccggcccttcatcgtgcgctgcaattcagtttgattggtatctccctgcatatacatcccccttattccgttatgtcagccatttgtgcgtatgtctaatcggtagctgtgcaaaaggtgcattgtcgtctgctgaatgagttccggcagcacatggaatgtgtacggcttgtacacgcgttccgtccatttatggccgtcctttccgtatacccctatattgaccgacggaatattcaattccctgatttctttaaaaggaatcgtcccgatgacatcccagcccggaaaattatcggtaaaggcggagacctcctcgtctgtttcatgcagcgataaaaagcttccgtccgctaaataagggaaaaactttttaaagacgaatgtttctccggttgatgccgctgttttatcgaccgcttcttgaatgacatgctgcaaaagccggtcccgtgtgctttcttccttcagataattgtgcggaaggtaaggcggcgcatagaaaataatgaccttggctccctgctcaggatcgagtttttgcagttcctcgacggctttaaagcatctcatccgcagttcaagatgttcatatgtttgaaatgcctgcccgatacactgtgccgggtctatcccgcggcttctcagccttttcaggtaatcttccagactgtacacttgaacgttccatgacatctcttttttcggcaggctcgttctcccacagtattcgtcgtaataatcagataatttttgttctgtctctttgcaggcttcgtcagccacggcggtcagctgatccatgacttctttggcggttttctcgtaaataaaataattaaaatagacatagctgctgacggcggtctgcacgttatacgcttccttgttgtcacgctggtagaggcaggtcggcggaagcacaagctccccttcaatgttttccgccatatgaatattgttgtgaattcttctggtgatttctgacgcgatcaaattcggatcgatgccggacagcgtatcaccgacatgcacctcccgcccgtaaatcgcaaagcaaggcaaaagctttcctgccgcgcccgtgtagatgtaccttgtcgtgtcaccctcatacagcggggtgataaaatcgttattaatcgctgctaaataacgaagctgcttttcttgtttcagccgttttaattcagaaatgctggttaaaatgccggaatgctggctttcttcatcggggtttgccatgaacagaatatggcccggcagctgatcgcgccgttcagaaaagtgaagcagattggcgagatgaacggcaataccgctctgcatatcaaccgaaccccttccgaacatccactcgcctgagcgggcgtcccgctgcacatcccgatcaaattcatagtttgagaaatactccgcgagacggtcggaatcaaaagcgatatcttttaaagggccgaaatcctcgatgccgaccgtatcaagatgagcgtgataaatgaccgtattcaggctttcgccgtttccctcaataaatgcgaaaatatttttgcggccgtaagggtcctcaggaatcgcctgctcccacacatgtgacggattctcctgaaagtagggaaagctcttgatcatatctttgatatagtcggctttttttccttctcccaatgtgccgttgatgctgtttaacgccaccagtgatttcgtaatggcttctattttctcctccggaagcattttgctgagctgctgatacatattccatcctccttaccctcatatagagaaaatagcgcgactctctttttcatcgcgctatttccgaaagattaataggcttcagacgttgtttttgcctgcatatgaagaatcagatagtcaggtcctcctgcttttgaatcggttcctgacatattgaagcccccgaacggctggtatccgacaatcgctcccgtacatccgcggttgaagtatagattcccgacgtgaaaatcttcgcgggcgcgttcaatgtgcgcgcgggttttcgataacagagcgcccgtcagtccgtaatcggtattattggcaatctcaagcatatggtcgaaatcacgggcttttgagatcgcgacgaccggcccgaaaatttcctcctgcatcaggcgggcgttttcatcaacatccgcaaaaatggtcggctgaataaagtatccttttgaatcatcaccttcgcctcccgtcaggagttttccttctgttttgccgatttcgatataactcatgactttattataagatgcttcgtggatgactggccccatgtatgtatcaaaatcttccggacttccgacggtgagtgattttgttaaagcgacggctttttcaacaacttcatcataaacgtcctgatggatgaccgcacgggaaccggctgaacatttttggcctgagaatccgaaggcggaatacacgattgaggaagcggcaagatcaagatcagcatctctgtctacaagcaccgtatctttccctcccatttcggcaatgacccgtttcagccacttttggcccggctgtacttttgcggcgcgttcatagatgcggcatccgaccgcgcgggaacctgtaaacgacacaaatctcgtcttcgggtgctcaaccagatagtcgccgatttctcctccgtcgcccggtatgaattggagcacgccgtccggcaggcccgcttctttcatcacttcaacgaatttcgccgccacgacaggcgccgcatccgccggtttcagcagtatcgtgttgcctgttacgatggctgccgccgccgttcccgccataatcgcaagtgggaagttgaatggagaaatgacgattcccaccccaagcggctcatagtgatactgattatattctccgtcacggctctttacaggagaaccgtctttcagtttcagcatctgacgggcataatactctaaaaagtcgatcgcttccgccgtatcagcatccgcttccttccacggttttcccgcttctttcactagatacgcggagaattcgtgctttcttctgcggatgatcgccgccgctttaaacagcacattcgcgcggtgttccggccgtacttttttccatgtttgaaatgcctgcagcgcagcctgcatggccttttccgcaagttcttttccggcggccgatacagaaccgatcacttcttttttatctgccggattgacggaaatgatctttttatccgtttcaatcgcttcaccgttgatgataagcggataatgcttgccgagctgtgaattcacataagccagcgcttcctgaaacgattgtttatttgtctcttcctgaaaatttgtaaatggttcgtgtgcgtatgaaactgtcattagaattcctccccgtattttgtaatgtgtgctcacgctttatgaagatgcaagaagcataccagcatagcaatttgtgataaaaacaagaaaatttttgccgaaagcggacgaagcttgtccgaatctgtcagctgtaatctgaaaacgcaaagaaattttgcgatccgctatataactgatgcaaaatctctttgcggataacacttatacccagccgcggaaccgggccgcttcagccgactttctgatgcccgtcatataggcggctaaacgcatatcgactttgtgggtatgcgctgtctgataaatggattcaaacgaattcaccatgacgctgcgcagttttccggcgacttcctcctcagaccagtaaaaaccttgattattttgcacccattcaaaataagacaccgtcacgccgccggcgcttgccaaaatatccggcacgagaagcacgcctctttcattcagaattttcgtggcgtctatcgttgtcgggccgtttgccgcctccacaatgattgaggctttaatgtgatgggcgttttcagccgtaatctgattggagattgcggcgggcacgagaatatcacagtccttttccagcagctccctgttcgttatgacatccgagaagagattcgtcaccgtgccgaagctgtcccgcttatccagcaggtaatcaatgtcaaggccgtcagggtcatacaaagcgccgtgggcgtctgagatgccgatcaccttggcaccggcgtcatgcataaatttagcgagaaagctccccgcatttccgaacccctgaatgatgatccgcgcattttccaatggaatcccttttttcttaacggcttcctcaatacaaatcgtgacgccttgcgcggtcgccgtctcccgcccctgtgaaccgccgagaacgatcggtttgcccgtaatgaatcccggcgaatcaaattctctcaggcggctgtactcgtccatcatccatgccataatctgcgagttggtatatacgtcgggagccggaatatcctttgtcggaccgacgatctggctgatcgcacgcacatatccgcggctcagccgttccagctctccgaatgacatcgtccgcggatcacagatgatgccgccttttccgcccccgtaaggaagatttgtgatgccgcattttaaagtcatccagatggaaagcgccttaacctcttcttcactgacttccggatgaaaccgcacgcccccttttgtcgggccgactgcgtcattatgctgtgagcggtagcccgtgaaaacctgtactgagccattgtccattttgacagggatgcggacggtcaaaagccgcatcggctctttcatcagttcatacatattgtcagggtaccccagttttcgcagggcctcttttatgatcgattgtgttgacaagaacaaattaagaacttctttttcttcatctttctgattgcttttagaaatcgggttggctgacatgttttatcacctcatcgtattttacgtgtaagcttcaattaccggcagaacaaaatgtaagcgcttttacaccaaaacccatcaatccctttcacattgtcgttacgccctttttatatgcaagattcatgccaggttttttgcgcataaaaaaaagaggctgttgtcagcctctttcatcctggattaacgcgggtcaataaccagctttgtttcggcataaagactgccggcccccaaaccgtttacgtaatcgcctttaattgtatacgcgcccgcgcgcggaaggtttttacgcaccaggacgagattgtattcagacgcgcccaataagtcaagggtaagcggaagtctgaccgtttttccgtagttgagaatttgcgtttctttcagtgttcttccgtttacagagtccctcacagtggcgttgaacccgtcaggaaattgaaattcaacggcgccgacggcaagcagcgcattcggcttgtatgtgacttcaatatcagacgtcgcgtattctttcgtactattgacggttttcgcttcaataacggcagattgggcgttcgcatgaaaagatggcaagaacacagatgaaaatactgcagcactgatgagaaaggccgaaaatgattttctttttaacatcatgaattcctccagatcatatgggattcagagcgtcctctgccggaaaagcgtgtctgatggttccattcgcgaattgggtttctcttttcctgagaataatctaccacctttatccatggaagtaaattattttttggaatattctatcatttatttttcacgagatgaatcagcacaaaaaacgaagacatccgctgtcttcgtcttgtgcgctatcggtgagccgtctgccagtcaaatccgatggtttcatcattccacgggattcttttttcgtcaggctgatccggattgtaggacattgtcgtgaaataaataatggtcagcggggtttcgccaagcactctgtacccgtgtgcgacgcctttgggaatgagaaggagcatcggattgtcttctcccatgtagtagacatccgtttctcccttggttgcagactcttcgcgaaggtcatgcagcacgacctgggcgtggcccgtcggaaaaaaccataggtcatcctgtttctcatgatagtgaaacgctttaatgacgccgggatagcttttggaccaggaagcctgcccgaaacgctctaagagatgttcatcgtcacggacgagttctgagaaaaaaccccggtcatcgctgtgtttgatcagctttttgatctttacgccttcgatcacttgcactgtccctccctttgtaaataatcatgcagcgcttcccgccaatgcctcatgccgagcccctgccgttcaatcgactcaagactcaacaccgagtaagcggggcgcggcgtctcatttccgtattcctccgtcgtgacgggcagcacggcggcggttctgccgctttcttcaaaaatagccttggcaaattcataccagctgcacactccgctgtttgcggcgtggtataagcccggcggcctgtcaaacagaccgatcaccgtttcggctaaatcttttgtatacgtcggcgctccgacttgatcgttaacgacacgaacctgatcatgtgtatccgcaagcttcagcatcgtattgacaaagttgtgcccgccgctgccgtacacccacgatgttctgataatggtgtggtttttccccgttaaccggatcagttcttcgccgagttttttgctttttccgtaaatcgtgcccggatctgcgggatcatcggtctggtatggccgtgttcctttgccgctgaagacgtaatcggtgctgatgtgaatgaatttcgcgccggtgttttcagcctcaagcgcggcataataagcgccgattccgtttattaaatacgctttgtcgagctccgtttcacatttgtcaacggaggtgtatgccgccgtattgacgacgatatccggcttgtaatggctgaacgagtgccgtaccgaacgctggtcggatatgttcatcatcgcttttgtcaaggcgatcacttcatacccttcccgcttcagctggcggcataactcccgccccagctggccggccgctccggttactaataccttcgtcaatcggatccccttctttccgattagtcttggctgtctgtataccagcgaatggttcttctcattccttcttcaaatgtgacgtcctgccgccatcccagctcatttttcagctttgaagcattgatggcgtaacggcggtcatgcccttttctgtcttcgacatgagcaaaccgctcctcgacaccgagctccttcatgataaatgacgcaagctctttattcgtccgttcatttcctccgccgatattgtaaatgtcaccgagtgttcctttttccagcacgagcttaatggcgcggcaatgatcttcggcaaacagccagtctctgatctgcatcccgtcgccgtacagcggaaccggcgtgccgtttacggcatgcctgataatggtcggaatcattttctcgtgatgctggtacggcccgtaattgttgctgcatcttgtaatgatggcaggaagcttatgggttctcacgtaagacatgacgagcaggtctgagcttgccttgctggccgaatacggattgttcggagaaagcggcgtcgtctccgtaaaagctggatcatccggcgccaaatctccgtacacctcatctgtggaaatgtgaatcagcctgccggcttttccctgtaacaccgcgtccgccagtcggtatgtgcccatcacatttgttgtgataaacggctctgcctgatttatgcttctgtccacatgggattcagccgcaaaatgaatgacagcgtcatacatttgggaaaagactttgtcaatgtcctctttttcagaaatgtcacctttgataaaacggaaacggccgttcttttttaaggcttctatttcaagcggcctgcttgcatacgtgagattatccaggacggtaatctgcgcgtccgtttctttcagcatcatctttgtaaaggtaaggccgataaatccggcgccccctgtaattaaatatgattttggcatgattaatgctcctgtcctttctgtaatgcctgatgcgccaggcttccggcgaggtagagcgattcatgcgtgcccgcatccacccaccagcccgttaacacatcatacgtcagctcactgtgttcaatgtataaattattgacatccgtaatttccagttcgccgcgttttgaaggggaaatttgttcaatataggaaaacacttctgcgtcgtacatgtagatccctgtgacgcatagtctggtcggcggctgctccggcttttcaatgatcgacttgatccgtttgtttttctcatcaatctcggcgatgccgaagcgctccggatcgtccacttctttcagcagcactttcgctccttttccctgctttgcgaaacgctccgtataaggttttaatgaatcttcaaaaatattatctcccaaaagcagaacgaacggatcgcgcccggtaaaccgctttgcgtatgataaaccgtcggatatgccggaggcggctggctgaacctgatatgtgattgagacgccgagctcttctccggtttcgagaagtttatgaaattgcggaatatattctttttgcgtaatcagcaggatatctgtaatccccgcttcttccagcttcatgatcgaccagtaaatcatcggatatggaccgacagggagtaaatgcttattgaccgcttttgtcagcggcataaggcgtgagccggtgcctccggctaagataacacctttcacatgaacacttccttacgtgtggttttatcacaaatcataaagaatcgccgccgcccgtttgatgcccctgccgtcaaccagcggctttccgttttgatgaagtccggtccgcagcggataatcagcggccatgtcagacatatgccgtgcgagaacgtccgctgatatgccttcaccaaggccgaggtgaacggcggccccccgtgcggcgaattttcccgccgtctcagtttgatgctccacttgagaaagtacgatgcagggcacacctgtacaaatggtttcatataaagtgatcccgccggacacgacggccatatcagccctcgaaagaagcgcggccatgtcatttgtctgccttaccagctcggcataaggcatttgtgtaagatgcgcgcgcacgtcgttagcatgaggcgcggcgccgcccatgatgatgatcactcgttttcgatgaatgtcggggatgcggcggcatgcttccatcactttaaagacaagcttcttcgggtcgcttcctcctaatgaaaccaatatggtccggcattcttttctcagctgataaagctgtttggctttttcaaaacccggatgaagaatcatataatccgggccttcatataccgcggcgctgcccttttggaccgtccggcttttcagccctccgtaaatgccgtttataacggcatcgcataaatgaatgacatgttcccgtttttcttcaaataagacgatgcgtgccgatgaatgctttttgacttcctctaaccagtcacacggcatatcgagcagatcgaaaatgagaaggtcaggagcctgcctgtttatttcccggacaataaattccttctgtcccttgtcaggcttgatgatcacttcccattgatcagatgacagataagaagaagcctctttatttgtgcagaacgttattgagcaattgttcttaatggcaccggcaagcagcttcatccggaccgcgtgccccatgccgatgtcacggcccccgtccgcgaagatcaaaacccgcatgctaatcagcctctttttgccggatcatttgattaatggccctgagctccggatcactattcagcagatgaatcaattcttttgccggaatatcaggacgcgagcccgcttttacgtacagctcgcgggccagcctgtagtcctcttctgtatcgacggtcatccgcaagtgaggagcccggagttcctgcgggggctcaggaaagagaagccggtacctctcaggagattctcttattaaaagcgtgacatgctcctggtatttgtccgccagcgttttgtcggcattgatctccgttaaaaggcgcgcgtttaccgcctcgccgccgatgccgagcggtgtaccgcagatatacgtgtagtctgcgtgctgatctaaatgcgattgaatcagaaaatcaagcagcgaaggatcgacaaacgggttatcccccgtcagtctgactgcgatgtccggtttaacttgttcgatgacttgtgcaaaccggtcaagcacgcactgctcgctgccgcggtgcacacggtagttcttgctgatgcagtgcgcagacagaatgtcgtcggtcttgctgtcagacgaggcgacgatcagattatcccgcgattgatcataatacgcgctttgccgaacccttttgacaatcatatcgaggatcgtatacccgccgatcggtttcagcactttgccgggaagacgcccgcttcccatccgcgcctgaatgataaacaaaatgtcagtcatcatatgggctgcctttcgtcaaaaggtcatcccaagtgatgcccgtgtcagcggggatatccctgaccgcacgcgtcccgtcagttaaaagttcaaaatatctcggatggagcccctgcggtttttggccgggacgaaggacggcaaggttttccgccgtaaaacattcgcctttttgaatcggcgccgttgaaaaaatgcctctgtaagcgaaccttctgatatccccttcaatcggtgtcgtggttttatgggagcttcccgacagcacttccggcaccggagcctgatgcccctgccgcagctccgcttcaaccgagcggatcgccgcaaccatttcttttaattcatccggattgagggcgaaggagtgatcagcaccgggcaggtttttatcgatcgtaaaatgcttttcaatcagtttcgctccgagcctgacagccgcgcacggcacatcatacggatgggcgctgtgatcggagaaaccgatcactgcatccgggaatgcggcggcaagcatgggaatgacgctcagattgctgtattcaggcggcgcgggatatttcgccacacaatgcatgatcgcaatttctgtgttcccctcgccggtaatggtttgataagcctcctgaatatctgaaatatcagcgcccgcggtggagaagataatcggggtcttcagccccgcgacatatttcaataacggcagatggttcagctcgtaggaggcgattttaaaagctgaaggggaagtcgcatacagtaagtcggcagagccttcgtcacataccgtgcttaaaaacagcacgccttttttcttacaatattcaaggagcggttcgatccactcagcgggcatttccattgattgcactaaagaaaatatcgagacgtcttttcccgcagcggttttgtacaagccggggtctttctgatacattttgtcagcctgaaacatttggaacttgaccgcgtccgcgccggcctcactggccgcatctatcaattcaaacgcctggctcagttttccgtcatgattaattccggcttcggcgatgatgaatacgggcgaaccttcgccgattgacttcgttccgatttggcatgatgccatcagtccgcctccttcccgggccacacatgatagtagtaataggacgcatccgctttaaatcccattctttcatacaggcggatggctcttacattgtggagctgcgttcccgctgatacagtcttatgctgaaagcgcaatgattgttcaataatgtgcgccgctaaatggaatcccgctcctttcccttcaaagcccggctttaccgccatcagatcaaggacgaattcatcgcctttagacagcccctgaataaagcccacggtctctcccttatatgtggcggcgaattgtaacgaagctctgccttccgcgttattccgcgcccactcttcaaacaggcggtttgcactttcatagctgaggcggggatcttggtaatacctgctttttgtaaaagcgtcgcgggccagccggctgatcgcttccgtgtcgccgggtccggctactgtaatctcaaacggcggcgtactgttatatacacgcacaggactgacgagcttgagcagactccctacaaaataagcgttcggaagctgctgaacaacctgcatcgcgccgatatcttcagccggtattttaataaatataaaatcagtgccgtccgcccgccttgccgcgtaaaattcctgaaacagccttttgagctgtccggcgctgtttgcggctgcaagcttcacattgatgatattttttcgaaacaattgactttcccacgaagagttttcatataagatcacgccttgaaggctgttttcttccaataaacagagcgacgattcataggcttccggctgaatgcccttctgatgcaggaaggtatgaatcatgtcctgcgcaagattttccctcagtctgtacacctaatcagcccctttgacgatatccgtaacggctgcaatgacgtattcaacgtcttcatctgtcattgacggataaagagggagtgacacggtgcggtgataatacgctgcagcggccggaaagtcagtctccttatacccgtacgttttttgataatacggatggaacggaaccggaataaaatgaacacttgtgccgatattatattggtcttttaaagcagaaatcagatcgttccggctgatcccggcctcctgctcctctatttgaagaacatacagatgccatgcatgccgcccgtcatcactgacatgcgggatggtcagccctttcatgtgtctgaaggcgtcctggtagcggctcgcaatgtcggctcttctttgctgcatgctgtcaatccgtttcagctgatgaagcccaagcgctgcctgaagatcaaacatattcattttatagccgggcgtttcgacctcgtagtaccagcttccgtttgaagaatagcggttccacgcgcctttgctcatgccgtgaaggctgagcaccctgatctgatcggcaagcccgtcatcgtccgtcgtcagcatgccgccttcaccggttgccaggttttttgtcgcgtagaagctgaatgccgtcgcatcgccgattgatccgatcattttctgtttatacgtggtatacacggcatgtgcggcatcctctaagacaaataactgatgcttttcggcaatggccagaatctgatccatattacacgactggccggcgaaatgaacgggtacaatcgcctttgtccgcggggtgacggccgcctcaattttttcagggtccgcattcagcgtaagcggatcgatgtcaacaaacaccggaacggcgcctgtgtgcacgattgtattggccgttgaactgaacgtcacggcagacgtgatgacctcgtcgccgggaccgatccctttcgctttcagggccaaaaacaaagcggcggtacatgagttcagcgcgatcgcgtgctttgcccccgtccaggcggcaaaggctttttcaaacgcctctactttcggtccctttgaaagccagcccgattcaagcgtatcaataacctcctgaatttcgtccttcccgatcatgggcaatgaatagggaagaaaagctgatcttttttgcaccattttctttgcgctcctatcttttttatgaagggtcaacccgtctgaagctgactccggttttttcctgaagcacttggcataaagcggcaagcgaatcctgaaccgggtagttcgcggcgacaaaagcacggcgcgcctgttccgctttttgatattctgcggggctttcgcatatccggattaattcctgagcaagtgcctgcgggtcctcaaaaacaaattctccaagtgaatgataataagggtatcggcgggttcccgctgattttccgatcagcacgggcttttgaaacagcatcgcttcaagaccgaccgttgatgtctgtgtcaccgcagcgtcaacatacgggagaatatcatacagctccatctcttttttgatgattttgcctgctttatatttccgcagcacctgattgtaagcatccagcttgtttttgccgatttcccacggatgcggtttaataatgagctgcatgttcttttggccggcaagctcttcaagcactcccgtataaaattcatcagaaaacggctgtgtggcgatcagcaccgtccgctgtgacgggagaaaagaaagtttgcggtaaaacgtgtcctgatctatcggctctcttgagaaaatctcgtcgaaacggggatgccccgtgatgatgatttgttcatccctgcagccttttgctttataccactccgcttcataagccccgaatacggcctgatagtccgtaaatacgggcagaaacgcttcatctcccatgagcgctccgtgctgcagacagatgctgacggcgttttttttcgcggacatcagcgccagcacacggctgtaaatatcctccgtcgtgccgactacaacggcggaaatcttctcggccgtaaacaaaatatcaacagcgtcaatcgcttcaataaataacgggatgtctttatacaaacgttcctgaaattctctgtttccgaaagcgggatggctgtgaagctctttcagaatggaatgggctttttcaatataagggacggggttccctttttgccccattcccgtcagctccaatttgcagataacgggcagcccgtaatggtcaggcagactccatctggccagtactgctgtttttgccggatcaaactgacggtagtttccctcggtgaaccgaagatgatcgaaatgcagaatgacttttccgtttaccggtttctcatctgttttcttaatgttttgccttttttgatcataatatggctgtataccggcttcaggaatatggtgatcagccggaccgaaaagctctgggttctgctccatgctctcccgaagcgccggactgatatattgataaaaattactgatcaatgcgagcgggatgtctttgtagcgaagtgactgaaaaaggtcaatatactgccggtacagcacccaatagttcgctaagtatgccgacaagccctcacccctttccaagcttttttaatgattccctcagctcccggcacgtggtctgctgcggaaggctgttcacaaactcgtttttctccgccgcgaaaagctgataatggatggattgatcggtaatataattgatatcaagctcctcagaaatcgggtaaaacggataaaaatgattcactctccagaagaaacgggcgtcaccgatccggtaaaacgccgggctttcatcccaataggaaccgaatgccgatttgacctgttccagcacggaaaaccggtgcatgaccgaacaatggtcaatggcgcacggcgcgttccacacgatccgttcggcgggcctggccgtctccttcaccgtctctttccgctgattcagatgataggttttggaacttgaatacacgacggctttttccgggtcttcatcaagctctttcaccattttctcaagccgttccggcacatacgtgttgtcgtcggtcgcatacgtcacgtactcgccctccgccatttctattgcctgattaatcaaggcggcgtagcgtgttttttccgttctttctttgacgcccgatacatcgctttgataaaaccggacgcggtcatccgtgagaaaaggacgtatttccgccaatgtcgcttcatttgagttgtcatccataatgaacagctcaaagtccgtaaacgtctgagacagaatacttttaatagagcgggccacatagtcacttttgttatagctcgtcatgatcactgacactttaggcaactcgtcacccccttttcgcacctgaaactaccgctatcatatgttccttatgcggaagatgcgctaggaatacagactattatgtgaaaagtcagcattgcgcgcacaaaaaaagccggctctgatgtccggactcattggagcgtattttcttttttcgcataaatctttctttgggctcatatggtggaatagataaaaacagcagccgctctgtcggctgtctgatacttgtcaggaggtttcagcatcaagaggttttcatcaaaggaggaacaatatgaaaccgaaaaagaatcaatatcagcaaatgcaggggatggggatgggaatggatatgcaaggataccagccgcagctcgggcctaatccttatccgcagcctcagggccaaggatcacaaatgatgccgatgcagcagcaaatgacaatgccgatgcagcaaggccagcagagcttcggcggggggttccccggccagccgcagcagcagggcggcggcagctttcagattccgtcaggtccatcatcgtcacaaaacgttcccggcatgctgccgattgaagagtcatacattgaaaatattctgcggttgaaccggggcaaaacggcgacgatttatatgacatttgaaaacagcaaagaatggaattcaaagattttccgcggtgtgattcaggcggcgggacgtgaccatatcatcatcagcgatccgaaaacgggcactcgctatctgcttctgaccatttaccttgattacatcacgtttgatgaggaaatcgcttatacttatccgtactccatgtcttcttattctccgagataaatcagaaagccaatcgctcacttgacagaggattggctttttttctttataaatatttgacggccgcgacgataatcataatccaagagatgataaacgccacgccgccgagcggtgtaatcgcgccgagaatggaaatctgcgtcacgctcaatacgtacaggcttcctgaaaacagaacgatgcccgcaaacatcagccagcccgcaacagaaacactgcctgcgccagaaagcttttcggccaaaaacgcgacagccagaagaccgagcgcgtgatacatatgatattgcacgcctgtgtgccacacctgcaaatatttatcggggattttcccttcaagcccatgtgcgccgaaagcgcccagcgccacggccaataaagcgttaatcgcaccaagaataataaacactttcatctatttttctcccgccttttcgttaaagtttccaattcaatcataacccaacatcggcaaaattcaacgtccgccgtccgatgacacgagattgtcggattttttctttttgataagctggattcggtcaatcgctatcgccagcagcgtcccgagcacaagaccgttgcttaagagcgaaatcaggatcggatgcatccccgataacgcgctctccggcacaaacattacgccgacccccgtcaggagcgccagaccgataatggagcggattcgtttttgctccgctttctcataagagtcaaactccgtaaaggcgagaccggccatcgtggagaaaacgacgaagtttaccgcaaagccgaccggtgagggcagactcgcaaacgcattcataaatagcgggatcatactgatgatcacgacaaatacacttcccaaaagaaacggctttttcgaaggaagcttcgtcgtctcaataaaaccggccgcccctgaaatcggcacaggcgcaatgccccctgacagtccgctcaaaaggtggctgatcgaagccgcaaacccagccggacgctcacgccgcttcccgacggtgccgccgaattttttcaccgccgcttctacaacccggatgctcgcgagcatgttgacaatcaaaagcacggtaatgaagagtgatgtaataatcaggccgctgtcaaacacgggttttccaaacggaaaaagagccggcagctgaatcacgcggtccggtatttgaatcggtttggcagcgccgaagacggcgaataagatccatccgccggcaagcgaaaggagaatcgcatactgtcttaagaacgtaacattcgatcgggacatgatgaacatcgccgccgtcacaaccatggcgagcccgaatacaaggccgtcgacgctgttttttaaatagccgatgcccaaaaggcctttcacaatcggctgactcagctgcatgaccaacagcagcagatacacaccggtcacaaccggcgtaaacagcacggccagccgttcaatcactttaaaaaggctgaacaaaaagaaaaagacagcgcttaataacagcgccccctgcagcgcccgcagcgtctcgccgaatgtcgcgaacaccgtgccagtcagtccgccgtaaatcgtgtatacgccccaccataagcctgccgggctttcattaatcggcagacgatgtccctggagacattggatgaccgcggcgacgccaagcacaaaaaatgtgctctgaatcaatgcggcagaatcggcatggttcaagtgaaatgattgtgcgatggcgacaggaactacaatcgcagccgcaatcataaaagccgtccattgcaaacccccgagtatcagtttcaagtcaatcaacctctcctgttaaaaatcgaaaatggaatccccgtttccgtcttcctcacgttcgtctttcgcttttttctgatattggttcagcccggcgctgcccatcattttttcaagcagcagcgggtctgtcgaaggagacgcggaaggtttcggcgccgctttcggaatcggattctgcacaggcgccggagcggtgtgcgtctgagtgccgagcacgacatcacacagagagcggatggcggccgcgtgcattttgacctcctcggtgcgggtcgccgttttcgcctgcctcagttcttcttccatcttctgaatcaaagcagagatatgtatgttcatgagtaaatcctccagcagtaatttgtcttcttcctgcattttatcaaatttctgagcgaatcgcagaattgagtttgttattttttctgacggcataccgccctgaacgccaaaaaaggcgctttccgccaggcggaagcgcctcaaaaaaaccgtttattgcggcaggtcggggatgcaccaatcgatcggctgctcccccattttttcaagggcggcgtttgtacggaaaaacggtctgctcccgaaaaaaccgttccttgccgaaaacgggctcggatgagtcgattcaataataatgtgtttcgatgtgtcaatgcgctcttttttcatctgcgcgtgacgcccccataggataaagacaatcggcttctctctttcattcaccacatcaatgatgcggtcagtgagccgctcccatcccttgcctttgtgggaattggcctgaccgcggcgaaccgtaagcactgtgtttaacaaaagcactccctgcttcgcccagctgacgagcgatccgtggttcggtacggagcagccgatatcgtcctgaagctctatgaaaatattttttaaagacggcggctgtctgaccccgggctgaacggaaaaactaagcccgtgcgcctgtcctggcccgtgatacgggtcctgtccgagaatgaccgcttttacatcctcatagggcgtataatgcaaggcgttaaaaatatcatggctgtcaggataaatcgtttggctgctgtattcttgtttcagcatttctctcagctcttgataatacggtttgtcaaattcatctttcagctgattccaccagctgtcttttaaaagctgtttcaaactgtccgtcccccttatgaactgtgcagtctcgaatggacgggctttccgtcccacacaatgtcagtcggcgcctcccgcctcttcatgtccggctcttcaagaagaaccgcgaagtttttcgtcgggagctccccaagcccgtgcttttcgcttaaccggtctaagtaccgcttccgtttgcccccgagatccgcggactgattgccgcctccctcaaaaaacgcatatatgacgctcgcgcaaggaacacgcttcacacggtgctgtttcgcggcgcgcaaataaaagtcccagtcccaataattatggacatccggatcaaaataccctaacgtgtcatgcagagaacgtctgtacatgctgcctgacggaacgtacgtggaaaatacccgcatatccgcataatccgccgtataggcgaaaggctttcgtgacaccgggtatctcgtgccgccccgttcttcaaatgacacaatttccgcgtcagaatggacaaaatccgcatcagcaagtgcagccgccattctttccaaatggcccggcgtaatgaaatcatcatcatcgcacagcatgatgcaatcacccgacgcttttttcacacctgcgttccgcgcttccacatgtccgacattctgttctaaatcaataatctgaatcggcagatcgctgtacagctgcttcgcttgttcggccgattccccggcatcatttacaatgatcacttcataaggctttatggtctgcatggaaatcgactccagcagctcacacaaagccggaatccgattatacgtgactatgacaattgatatattcatgatccgctccttctgctttttctcatgttctattaaaacataaagcggcggagagatcaggggggatttttgatttcggcccattcagaaacaaatccaggtcatgcccgccagcaaaacgagaatgatcagaaggtctccccaaacagtgcataccgccttggcattaagtctgcccgcctccatggcgttccaaagttttgattgataaacaggcaccaacaccatcgcatagcttgtgcacaagcagccaaaagccggcgggacaagcgcagcgctgtcaaatcattcctccaagccttccgtattgtgatcgggagaaaatctaactataatgagatataaaacactgatggaggccattgatatgtcaatgcacaaagcacttactattgccggttctgattccagcggcggcgcgggaattcaggccgatttaaaaacatttcaagaaaaaaacgtatacggaatgacggctttgaccgtgatcgtagcgatggacccggagaacagctgggatcatcaagtatttccgatcgatgctgatacgattcgcgcacagctggcgacgattgttgacggaatcggcgtagacgccatgaaaacgggaatgctccctaccgtggagatcatagagcttgcggcgaaaacgattaaagaaaaacagctgaagaatgtcgttatcgatcctgtcatggtctgcaaaggagcgaacgaagtgctgtatccggagcatgccgaagcgcttcgcacccaattggcgcctctggcaaccgtcatcacgcccaacctgtttgaagcaagccagctgagcggtatggatgaattaaaaacggtggaagacatgaaagaagcggccaagaaaattcacgaactcggcgcgaaatatgtattgattacaggcggaggcaaattgaaacatgaaaaagcgatcgacgtgctgtatgacggagaaaccgcggaagtattagaaagcgaaatgattgatacaccttacacgcacggagccggatgcacattctccgccgccgtgacggcagaactggccaaaggcgctgaagtgaaggaagccatctatgcggcgaaagaatttatcaccgcggcaatcaaagaatccttcccgctgaaccaatacatcggaccgactaaacattcggcgatgcgtcttagcggaaaataaaataaatatccccctcatgatcgagggggattatttcatttttttcgcggatgaccgtaaaaacatctcaatcgattgcacaaacagcgcatattccttcatctgttcatatgtatgcatcagccgatcactccattcattgtgcggctcagccctcttgagcatgcgattcagctgaagcaatacttctttatattcttcccgcttatcttccacttgctctgcggctttgacaagtaaacatttcggcgtcatcttctgatttttcaaaactgagaaaacaactccttttattcctggaatcatagtctttcgtttgaagaatagcacagatggcataggtttcacataagaaaaaagaacgattttctacaaaagtgtccaaattgagccatttatttccatttttcctaccgaagtgacggttacgtcatcatttcccgggaaaggaaaatatctggcgctgaaaacctcttctccatcattcaaaaacaattcgatcgaggatgcatccagaaagagctgcacggaatccacctcgctgatggcgcagcttctcttttctttttcttctccgctgaaagcggtgcgctccagcacagccagcccctcttcctgatgaaatataaaccgggccgcgccccgaattgagatttcaaaaccggattcgcaagtgatgtcttccagcagcacttcagcccgggacgcatctttcaccggcaggcttacagacgagcactccaattgaagacggcgcttttgctcatccgtgcggcgtaatttcatttccggaagcggacgctgtatgattctgccgttggacagtgacagctgtctcggcatcgttaagcagtgaatccagtgatacgcatgtgtcggatgtttgtcctcctgctgatccggaacgcccatccacgcgaacagaattctccgtcccttatcatcttccagcgtctgcgccgcgtaaaaatcaaatcctctgtcaagctccgtaaattcaccgtgcttaaattctggcggctctgtatgcagcctgccgaggaaatagcccgcctggtgactgttatgatattttatcccgtcggcttcaagcccctgcggacatacgagcagcacgtcggttccgtcaagggaaaacaggtcgggacattcccacatatagccgaatgacccgagaccgccggagtccgcccccgcaatcgcaccgagaaacgtccaatccgtcaaattctccgatatgaacaatacagcgcttccggtgagcttttccgtctgcgcgccgagcaccatgtaatacgctccgtctttcttccaaaccttcggatcacggaaatgagcggtatagccttccgggagacgcgcgacgactccttttttttcaaatacgatcccgtcttcggatacggcgaggcattggtacgtttcccgattgccttctccgtcacggacattgcctgtgtacattaggcagaggcgcccgtctttttcgatggcgcttccggaataacagccgtttttgtcataccactcacccggcgcaagcgcgatttcttcctctttccactcaacgaaatccttcgtcgtcacatgcgcccaaaatttcgcgccgtgccccgtatgaaatggctgccattgaaaaaacaagtgatatacgccgttccattggatcacgccgttcggatcatttaaaagcccgaccggcggcataatatgatagttctggcggtatggatctgacgcggctgtttcttgccgcttctttttcgcttcctcagcctgcaggcgcagctcttgatccggtgtcctcatttgacggcctccttttctttagctcccataatataagcggcaataaacgccgagacagaggcgatgcccattccgatcagatagtttattagatttcctaaaccgagcggagccgtgatggcaatcatcggaattccggtcagaccgtaggcattggcggcgacaccggtcaccacgacataggctccgcccagcgctccgccgatcattcccgcgataaacggcttgcggtatcttaggttcacaccgaaaatgactggttcggttacgccgagaaaagcggaaaatgcggcaggcaaagcgatttctttcattttcgcttttttcgtcaggaaaaatacagccagtcccgccgcgccctgagcgacattcgccatcgaccagataggaaggatatagtttctgcccaaatcagcgatgaggccggcctcaatcgcatgaaagctgtgatgcacaccggtaagcacaataagcggataaagacctccgaaaagcagtccggcaacaatgcccgcatgatcatacacatacgtcagcgagacggtaatgcctgatccgatcgccctgccaagcggaccgattgcgataaaggtgataaatcctgtgacaatcaccgtgacaaacggcgtgaccaataaatcgaatgcgtgaggcacaatttttcgcgtgcccttttccactttgctcataatgtaaacggctaacagtacggggatgaccgtcccttggtagccgagcagcgcaatgtcgaagccgaagagctgcataaaatcaggcggtacatccgcaagcccccacggattcaaaagcgccggatggatcataattcccccgagcacggcaccgagaaaggcattaccgccaaattccttcgccgcgctgaacccgatgaatacgggcaggaagataaacgccgcgcttgaaaacatgtctagaagcttaaacagcgatgattgttcagacacccagtgaaaagccttcatcatgccgagcagccccattaaaagtccgcttgccacgatagccggaatgatgggaacgaatatgttagacagtgttttcgcaaatcttgcggctggattcagcttttttttcgctgcgtcctgatgtgtctcacgatcctcccgctccaaatcggcttcttttgaaaaagcgtcatacactttattcacgaggccggtgccgaatataatctgatattgccccgagctgctgaaagccccttttactccttctgtctcttcaatgccggcctggctgatcttctgttcatcttgaatgacgagcctgagccgtgtggcgcaatgtgtcgcgctgatgatatttgatttccctccgatgtgtttgataagctgttttgccgtttcttgataattcattatgtatccccctttctaaaatcaaaaaagacctaaaattcgccaacgaaaaaggtcagcatgatccctttttcatgtacgcaaattttaggtcttgcctgcattaccagtcacaatcccgccggattcagtttttttaatgcgctttcattctattccatgatagcgctttcgtcaatatgttttcaaaaaaaaagtctgtttctcgaaacagacgcgttattccgggtttttttgcagacgctggacatgcagcgtgatatagccggcctcggattccggcagttccaaatcatattcagtttttaaaaacgccgccagttcaagcgcacaccgataagcaaacggatactttttttggatgaaataaagcatctcctcgtccatggaatggagtgcttcatttgaatccaaccggctgaccgcataccgcaagtgcgtgacgaggcgctgataggaaatactgtcttcatccaccttctgttcgaaaaaggattcgatcttttcgatcatttctttgatcatggttgtatgcttcatcgccgaatacatgcttttggcatccgccttggcagtgtggatatgaagcgcgatataccccgcctcatcatcaggcaatgatataccgagggtttgtttcacgtgttcaaccgcccagcggccgatctcatattcttttttataaagcgccttaatttcatgaagcaatcggttatgcacctgaaggccgttttgaatcctttcgatcgcaaaggataaatggtccgccagcgcaatgtggatgtgatcgttcaaaggtgccgcaagctctccctccgcatggctgatgatatcttcagccgcctctatatgctcttcgggaagcgtttctaacacttgtttgaacttttcattttcgtcgtgcacgacaaatattttttcaattttatgcttttgaatcacatcattttttctcttttgaaaagcgattccgggacccattacgatcttttcccgtccgtcttcttttattaacgccgcattgttgtttaatactttgtctattctcaagaggttcgctcccgttcatatgtttagtgggattgtaccctctttttcatatgatgtaaaggtgccggacccgcgcgctcccgtttcggcaattctttgcggacaggcatccatcggtttttatccagcctgccgcgggccgatttcgtttcatcggtcaaatccgccgatcggacacggctcacaaacgaaaaagccccagccgtccgcttcgctttcttatgataagccgcttggtttccgtacacggcggctaatggatatcttccgttacccggcgccatccagttcatcagaaagaccatccacacccgtaaagatactagcaaacgtttcattgcaaatcatccctccgcttctttttgacagacagcttgttcgcaggcctgtttttctctccgctttaacggaaaaggcggccgatccttctccgctaaaaactagcgggtctagcaaccctatgactctatgatagacgcggccgggcgaattgtttgtcacaatatgagtgaaaaaacaaactagttttcagaagttttgttgaaagctgatggaaatgacctgaaaaatggaaaagccgataaaaaaagttatacacaccttatcccttggttaagcacagcttaaacacagtgtatatccacatatccacaaactcgatctatattttgtataggaacattcgttcccaacaatatatatacacaaatttattcagttatacacagaattctgtgtataactccctccttattcacagaccaatttccataaatgagtcatatgtcacaaggattattttgaattttcaagaaatatatactagatttctaatttagataaagaaaaagggggaaacacgattgaaaaaaggaatcatccgttatctgcttccggcttttgtcttatcctttaccttatccacaagttcacaggctgcgccggcttcaaaaccgcaaactcctgatcttgagaaggctgaggtgttcggtgacattgatatgaccaccggcaaacaaacgacagtcatcgtggagctgaaggaaaagtcactggcggaagcaaaggaactcggcaaagcacagacaaaaagcaagctgaaaagcgaacgctcaaaagtgaaaaagaaagcgctcaaaaccattaaacacggaaaaatcaacagggaatatgagcaagtgttttccggcttctccatgaaactcccggcaaatgaaatccccaaactgctgagtgatcaggatgtcaaagcggtttatccgaatgtcacctatcataccgatcagctcaaagataaagacatcaccctatctaaggatgccgtgtctccgcagatggatgacagcgcgccttatataggggcaaatgacgcgtggaagctcggctatacgggtaaaggcgtcaaggttgccattattgataccggtgtcgaatataaacaccctgacttaaagaaaaatttcggacaatataaaggatacgattttgtggataacgactacgatcctgaagaaacgccgtccggtgatccgagaggcgcgtcgactgaccacggaacccatgtcgcgggcacggtagcggcaaacggaacgattaaaggcgtcgcacccgatgctacactccttgcctaccgtgtgctcggtccgggcggaagcggaacaacggagaacgtcatcgccggcatcgaacgcgccgtacaggacggagcggatgtcatgaacctttctctcggcaattctgtgaataacccagactgggcgacaagcacggcgcttgactgggcgatgtcagaaggcgtcacggccgttacatcaaacggaaacagcgggccgaacaattggaccgtcggctctccgggaacgtccagagaagccatctccgtcggagcgacccagctgccgctgaacgagtacgccgtctccttcggttcctattcctcagcgaaagtaatgggctacaacaaagaagatgacataaaagcactgaataaaaaagaaacagagctcatagaggcgggtatcggcgagcaaaaggattttgaaggcaaagatctgaaaggaaaagtcgctgtcgtcaaacggggcagcatcgcctttgtcgataaagccgacaacgccaaaaaagcgggcgcgatcggtatggttgtgtataacaatgccccgggagaaattgaagccaacgtaccgggcatgtcagtgccgacgattaagctttcatcagaagacggcgaaaaactcgtcagccaattaaaagcgggcggcacaaaagcgacattcaatttatccgtggctaaatcgctcactgaacaaatggcagacttttcgtcacgcggtccggttatggacacgtggatgattaaacctgacgtctccgctcccggcgtaaacatcgtcagcaccattccgacccatgatccggccgacccgtacggctacggatcgaagcagggaacgagcatggcttccccgcatgtagccggcgcagctgccgttatcaagcaggccaaaccgaaatggagcccggaacaaataaaagccgctctcatgaacaccgcggaaaccttaacggacgcggacggtgacgtatacccgcataatgcgcaaggcgccggaagcatcagaatcatgaaggcgatcaaagcagactcccttgtcgccccgggaagttattcttacggaacgtttatgaaagacaaaggcaatgaaacgaaaaaagaaacctttacgattgaaaaccaatcgtccatcagaaaatcatatcagctcgagtactctttcaacggcacgggcattaccgtttcgggcacagaccgggtcgtgatccccgctcatcaaaccggaaaggtcaatgcgaaagtaaaggtcaatgccaaaaaagtaaaggcaggcacctatgagggaaccgtcacagtgcgtgaaggcggaaaaacagtcgcaaaagtgccgacgctgctgattgtaaaagagccggactatccgcgcgtgacgtcaatcgacgtgcaggacggcacaacgcagggaacctaccaaattgaaacctatcttccggcgggagctgaagagcttgccttccttgtatatgacagtaatcttgactttgtcggccaagccggcatttataaaaagcaggataaaggctatcaatatttcgactggaacggcaaagtcaatggtgacaccgcactgccggcaggagaatattatatgctggcctatgccgcgaacaaagggaaatcaagccaggtgctgactgaaaaaccttttatcattgaataaccgaacaaccctgctggagcatcagcagggtttctttctgatcattcggcaaaagcttctcgaagcaggcggtatgactgaagtttatcttcaaaatgatgagtaatggttacagccatcacttcttctgttccgtatgctttactgagagccagaatctgttctttcacttgcagcttcgttccgatgatcattcgattccgattatcggcaattcgtctttgttcatacggtgtatacgtatttccgcggacggtttcgtaagacggtacgccgtgaagcggaatcccctgttcacccgcaagcagtgtataatccatgacagccgcgagttcctccgctttctcctccgtatccgcgcacagcacaaacaccgccacggccgtttttggttcttttcctaatagagaaggtttaaatctgcgcttatattgtgccgtcgtgctttctccgccttctccattaataaaatgggcaaacatatagcctgctcccgtttctgcgctcagaagcgcgctttcccccgatgaaccgagaagccagacttccggcgccgtcttaataaggggtgatgcggtcagattcggaaaacggtgattgtcatcagctgcatcatgcaaatacatcgccagctcacgaatctgctgcggatattgatcagcattccgcttcccgccgtcattcagcgcccatgatgcgatcggcattccgcccggcgctctccctaatccgagatcgattctgcccggcgtcaaaccttcaagcacgcggaaattctccgccaccttatatgcgctgtaatgcggaagcatgacaccgcctgatcctacacgaatctcattcgttttcgccgcaatatggctgatcagcacttcagggcttgaacccgccaaccgctctgaaaaatgatgctctgacacccaaaacctcttatatccgagcttttccgcctcctgcgccagtcttactgtattccgcagagcactttccgcagaactcccttctgatacaggagattgatctaatatgcttaatgaaatcatcactgtcacctcctcaacatcgtaccactgctaagccgttttttctttctgtatgcttataagcatccctgatgataaacatttatataccttgttccattttgtcgaaatatgttacacgtgaaacataaaaaaacctctcccggtcaggagaggttttttcttaattcttttgaaaacctttatcttttacatattgatttaaataggttctcggtttttgtttcatgaactgcaggatttgatcagaccacgtttcaacccgcttgccgtttgtccgtttatcataataagcggaaatggtttcatcatattccttcatataactgcggaagtgttcttcattcgtatcgtacgtgttttcatgatatacggcttgtttcggcaggcgcggcttttgaccggacggatgagcgggatgaccgactaccaagccgaacagcggcagcacatggtcaggtgttccaagcacttctgtcacctgatcaagttcatttcgaatgcctccgatataacaaatgccaagtcccattgattccgcggcaacacttacgttttgtgcggcaagtgcggcatcaatgacgctgaccataaacatttccgtattctcaagaagctcggtaatgttttcgcctttttcctcagcaagttttttatggcggtacaaatcagcgcagaacacaaacaagtgcccgttattttcgacgtaaggctggtttccggccagtgccgccagcttccgctttttctctttatcggttacaccgatgatggagtaagcctgcacgtaactggacgttgacgccgcctgggcgcttttcactaatgtatctatctcttctgctgtcagaagctcgtcagtaaatgatcggatcgaccgatgattaagtatagtttcgatggtattgttcatataaaagcctccttctttatatatcatatccgaaagggaatcatgtcaaaagcgaaatgctctaaacaaaaaaagacaacccgaaaaacgagccgtctcacattaagaattgaacaagtagcttttatatttcgtcagctgcacacttgcgttatatacgatcccgaagctgattaatgtagaaagcaccgagctccccccataactgacaaacagcagcggaataccggtaaccggcataatgccgatattcatcccgatattctggaaggtgtgaatcacgataagtgcagtaaatcctacgcaaaaaaacgcgccaaatcggttaaacgcatgcaagcggtcaatcagcaccacaagtctgtaaattaaaaagaaaaacatgacaaccgcaatggcgcagcctaaaaatccaaaactttcacccaaaatcgcaaagataaagtcggtctgtccctcaggtacgtacaccttcagattatgaacgccgtttccggtaatgccgcccgatccgatcgccataacggcctgatccacctgccagcttttatcgctctctgcctgagtcgttgccgcactggagtcagacatccacgatgtaatccggttaatttgataatccgcaatgccgattgaattcgccacatggggaaattcaatcacgagaactaagaaaaggccaagcacaagcgcggccgaaccgccgataatggtgatcagcttccagtttacacctgacataaacaccatcaccataacgataaacagacagatcgcacccgttccggcatcctgcaaaacgatcatcccgatcggaataaccgtccatgccgcaattttcaaaagcagattcacatcttccctaagtgacctttgatccttcgggcccgccttcgatataatggacgcgaccatcatcataattcctattttcgtaaactctgaaggttgaagagtgaagctgccgattttaaaccagctcttcgctccgtttttaatcggcgcgatggattccggcgccacacgcaaaaggagcagcgacagcacgccggcaattaacacgtacagactcagtttttcaagctgctctaaatcaaaatacatgatactgaccatgagaccggctccgatgacataaaagacgatctgtcttatccaggcatcacttccgtactgcccgaactgtccggccgcataaatcgccgcaacactaattattaaaaacacaccaaatataaaaatcaaatccccctgataatagggattttgctgtttcttatatcgactcattctatcccgccttacattttcatcggaagtcactattgtttattatacatgaacaccgttcaagaaaacatgatgaggttgcttcctttttattttttacggtttggggactacacgacatatgacgtgtcagaaaaggaaatgtttcggtcatgatgaaacttttccgataaaaaaccccttctcgtcagaaaaggggtttcagcctatgtttaacgtcataaacaagctgttcgggtcctctttataatgtgcaaacggattacaatattgaaacccggctttttcatacagacgtctggcggggagaaaagcctccatagaaccggtttccaagctgatccgctgatagccccgccgccttgcttcttcaatcatatggcggaggatccggttggctgcaccttttctgacatgatgccgagaggttttcattgatttgatctcaccgtgccggctgtttagctcctttaaggcaccgcagccgagcaggatgccgttttccctcgcactccaaaacgtaacgtcaggctgacgcagccggtccgcattgagcgcatgtatactttccggaggagaatgcatggtcatgctcttcagatgatcctgcaaaagcgcaatgacatccggcgctgtgacatcttctttccttacgtccacttcaaaccacccttgctgtgcatgtttctttgaccatagcaaaggttcatagcctgcgccattccattgtccggaaatgtgacagggtatttggcctttccggtttcttgtacctatccaaaaatgaggcaatagttgcaatacatttctcgaaaaagcggtatcaaaaattggaaaacatggtataataattgtaacaaaatgttcaaaaaacgaccacaaaacagacacattttattctctgtatttcattttggaaacgctcccataaaatgaaaggagacatgtaagatggacatgttttttgcttatttactggtcgcaagcgcaacacccctctttatctggctggataacaaaaaagtcgctctttcggccataccgccaattattctcatgtgggttttcttctacttttacgcaaccagcagcctatcccctctcggccacacacttatgatcatcctgttttccgtcaacgtcatcgttgcccatatcgccgcctttatcatttacggccttccgcgcctgcgccggagaagaagccaataaaggcacaaaaaaccctcttcgcctgaacgaagagggtttctttttattcctgatgttcggaatgatgctttgcaccgccaggagggtttccatccatatggtcaccgtgatggtagtgcgccgcaaagatccagatggaaccaaggatgataacaatcgctccgaaaaatccgaagagcgtgtttccgacttgaattccgccgttttcgctttctgtcatgtgcatgaacatgagaagctgaagaccggcttggataaatgcgaatccgaaaatgatccagagttttgctgatgggcttaattccgtatatactgcaacccaaagggccagcagggtcagaataatagacaacgcaaaacctacgatatgcttccacggaaagtggctgtgttcagcagatttgtttgccatattatagtccccccaatccgatgagatagacgcctgtaaagatgaagatccaaacaacgtctaagaagtgccagtataaacttgagataaagatttttgaagacgtctgcggcgttaatccgcgtttcttcaattgcagtaagatgccggcaatccagaagataccgatcgttacgtgcgttccgtgcgttcccagaaggacgaagaatccagaccagaaagcacttgtaccgagagatgctccttcatgtacatagtggatgaactcgttaagctcacatccgacgaagcccgcgccaagaagaagcgtaatgatcgtccaaatgacgacgccttttaaacttccgcgacgcatttcatgaacagcgatcccgcaggtgaaactgctgatcagaagcaggaatgtcatgatcatgacaagcttcacttcaaataattcagccggtaagactcctcctgctgttcttctttgaagaacgaagaaggttgcaaatagtgttgagaacaacacaatctctgcccctaaaaagatccaaaacccgagaatattgagtctgccggtttcagattgatattccataggcgcgttagaattgccgtgttctgcatgttccataaatcacgcctcctttattcggaaatctttctttccgtctcttttatttcttcaacaggtatatagtagccattgtcatattcaaatgaacgaagcaccatgcaaagcagaatgccgatcaagccgacaatgcccatccagaaccattcaaatacaagtccgaagcctgcaataccgaacgccactgacataataagcggtcttccggagttgtgcggcatatggattttcttgaacttgctttccggatgaatatccgttttgtcttctttcaattgcaggtacgcatcttgagatttcacttcaggaagcaccgcaaagttgtaatgcggcggaatcgcagatgaagtcgcccactcaagcgtacgtcccacgccccatgaatctccgctgatctcgcgagtagagtagcggaagctgtagtagatgttgtagcaaaggattaagaatccgacacccatcatgaaggctccgacagttgaaataaagtttaatgcagtccatccgtcattcggtccgtaagtgtaaatacggcgaggcataccttgcagccccaagaagtattgagggaagaaacatacattaaatccgatcataaagatccagaagaaccattttccgattctttcgttcagcttgtggccgaacattttcggataccagaaaataaatcctgcgaaacatgcaaataccgtacccgcgatcagcacatagtggaagtgagatacgaggaagtacgtattatggtattgataatcggctgcagccatcgcaagcataacccctgttaccccgccgacaacgaagttcgggatgaacgcaagcgcccacagcatcggtgttgtaaaactgatccggcctttatacatcgtaaagagccagttaaagattttaaccccggtcggaaccgaaatcgccatcgttgtaatcgagaagaaagagttaacggacgcactgttccccattgtgaagaagtggtgagtccatactaggaaactcaggacggaaatggcgataattgagccgaccatcgctttgtaaccgaataactgctttcttgcaaacgctgaaataatttcagagaaaataccgaatgccggtaagataacgatatatacttcagggtgtccccaaatccagaacaagttagcccaaagcatcggcataccgccggcttccagcgtgaaaaagtgagcgccgaacaaacggtcaaatgataacagcgccaatgccactgtcaaaacagggaaggcgaatacgataataaccattgtaatcagcgtcgtccatgtgaacatcggcatacgcatcagcgtcatgcctttcgtacgcattttcaggatcgtcaccataaagttgatacccgtcatcagcgtaccgataccggcaatctgaagaccgagcaggtagaagttctcaccaggcccgggactcatgtcgttgcttgccagcggcatgtaactcgtccagcctgcgttcggagaacctccgataacaaaagaaatattgaaaagcatcgcacctacgaagaacgtccagaaactcaggttgttcaagtaagggaatgctacgtcgcgcgcaccgatctgcaaaggtacgacaacgttgatcagaccgattaaaaacggcatcgccatgaagataatcatgatcgtaccgtgagtcgtaaagatctcattatagtggtttgagtctaaaaaactgttattaggaagcgctaactgggcgcgcatcatcaagccgtcgaccccgccgcggaacagcatgataacagcagagataatgtacatgattccaagtttcttatggtctacagacgtaagccattcagaccagagccacttccactttttgaagtatgtgagtacaacgatgatagcaatagtggaaagcgcaatggaaacttgtgcgcccagaattaatgggtcacctgttacaaaaaattcatcccatctcaatttcattcgggcttcctcctttcttgttcaatttcaatcttgtttatcgtcggatactttaaattcgtttttctttacattttcccacggatctgttttagagtgcggtgatacggctttgtagccaaggcgtttgcgcgcctccatcgcatattcggcatcttggccgtggtcaacgtattttaagtgtgtagaagagaacgttaatttaccgacattctccggaagcatcagttcgtcatacttctctttcgtcagctttggagaatcgctttgggcttttttcacccagctgttaaagtctttttgcgtaacagcttttacgttgaatttctggtcggcaaagtgttcgccggtgaagttcgcgttgcggccttcatatgttcccactttgtcagcctgtaagtattgatccatcagcattcccgccatcgcgtatttttgtcccccaagctgaggaatccatagcgatgccattgaatcggctgaagaaattttaaataaaaccggacggtctacaggaatgttcaggtagttaaccgtctcaatatcctgctctgggtagctgaatacccatttccagtctaccgaagtagcataaacaacaagaggctctttatcctttgtcgcttcaggcgctttttctaacgaatatatcgtctgtacggtaggcacagaaagtgcaataacaattaaaattgggatcactgtccagactacttctaagaacgtgttgccgtgcatctcgggcttgtaatttccgctgtctttgcctttgcggtcgcggtatttcactaaaatgattgtaaatagtacgaaaacgacgccgacaatgaacagcataaatccgattgacaagagaatcagatctttctgctggtctgctacaggtcctttcggatctaaaacggaaatgtcgctgcatccgcccagtacgaaaacaacagccaacatcgctaataaaagtaacggtttaaatgctctgaacaagaagatcaccatccttcctattgatgtagtgaatctgaaatgtactttctcaaaatcttttctctatctaccttgttatgctatcaaaatctgcccttattagctttatttttttctaaagttcatctttttttcgacctaatgtcacaaaatcgtcaaaaaatgcatgaactttttccacttgcgcaaatcaaacataaaaaattttagatcatttagcatatatagagaaaaaagatagtgagaacgaataataccaaataaaggtttaccataataaaaaacgctggtcaacaaaaagtttcattttgttaaacattctacaaaagaaatattttttcctttgctcacaccttttcacacggtttccattttaacgcaacgcattatgaaaaaaaagaccggaacgcgccttgatatgttcattataaaaaacgcattcatatgtttaatatggacaaaacgaaggtaacatataggcataaataataaaaaataggaagtgatatttatgggttttatcgtatctctgattgtcgctattattatcggctggatcggaagtttatttgtaaaaggcagtatgcccgggggaatcatcgggtcaatgatcgccggtctgatcggcgcatggatcgggcacggactgctcggcacatggggtcctcaccttgccggctttgccatcattccggcaatcatcggagctgcgatcgtggtattcttattcagcctgatcgccagaagcagaggataaaaaaaagcctcgtcccttatgggatggggcttttttccggtagagcgcccaaatggcggataaaccgccggaaagccgctctgccttcttctgactgtttaaagacgccggcatgctccagtatccgcgcaaaggcatggccgatttcctctttcaaaatctgttccgcgttttctttcgttaccttccgcttatgcagcacgctgagcgcccaatctttatgcgttgccgcagaagggtctgccgttaagaccgcttccgggtccggtgagcacagcgcttcagccgtgtatttcatttcttgttcaaggcggcccggcagaatcgcaagccccattacctcaatcagtccgatattttcttttttcaggtgatgaacttcctggtggggatgaaaaattcccagcggatgctcatcagaggtgcggttatttctgaggacgagatctaattcgaataaaccgtttctccgccgggcaatcggcgtaattgtattgtgcggtgttcctcctgaacaggcgaggagatcagccgcctcatcggaataaccgcgccatgcccgcaggatggcatccgccgcgccggaaagctcagacgcactctcgctttgcaggcggatgaccgacatcggccacttcacaattcccagcaccgttttcggatagtcaggcagcctgtaccggctttctgtctccgcccgcgccatcgggaattcataattgcccccctgaaaatggtcgtggcttaaaatactgccgccgacaatcggcagatcagcattggaaccgagaaaataatgaggatactggctgacgaacgacagcagccggtcaaacgtttttttgctgatcttcatcggttcgtgccggtctttcaaaacgatgcaatgctcccggtaatacacatacggagaaaattgcagaaaccactgctcatcgccgagaatgaccggaatgacacgaaggttttgacgcgccgggtgatccggtctcccctcgtacccgacattttctttacaaagaacacatctcggataatcggattgaggctgctctttggcagcggcaattgctttcggatctttttccggttttgaaaggttgatcgtgatgtccagctttccgtaagccgtctcagccgtccacccggcattccgctgtattctgtccgaacggatataatacacatcctctgaaaatcggtaaaacgcctttgtcgcctgctccggtccgtgcaccgcctttgtttcttcaaaacgacggacaatctcggacggctgcggggcaaagcagcccatgatcttcgcgctcagcaggtcgcgataggtgtctgtatcggctgaaatccggcccgtttctgccgcccattcataaatcggggccaatatgtccggcaatgatgccgccgattcattttctttctgttctggaacctccggatgggtgatatgcaaagcttcatataaacggtttcttgtatattcaatatcaagaaatgaaatcagctctttttgcaatccgtaccggattaaacgttccacgtgccgctcaattgccatcgtcatccccctttagttctctcgctccggctccgacatccgccgtgtaaaagtcagcttttctccctgtcttttcctcatagcgggcccctgccgtttcaataaaatccgaaaccgcatcgtccttgacgatattgaccgtacagccgccgaaaccggctcccgtcatccttgatccgatcaccccgccgtggcgccaggccgcttcagccagtgtatccagctcatgactcgtcacctcgtagtcatcgcgtaaagagagatgcgaatccctcattaattcaccgatatgataaagctgattgttactgaacatgtcggcggcctctattgtgcggtgattttcatagacggcgtgtttcgcccggcgtctgttcacttcattctgaatcagccccgcatgggcatcaaaagcggaaggggtcagctctcccagtgattgaacggaaagatgcttctgaagatcacaaagcgcctccccgcactctttgagcctcgtattatagcctgagtctgcaagcgttcgttttttattggtatttgcaataacgatcgacagccccgaaagcccgagttttgtatattcaaagctgagcgtcccgcaattcagcagaatcgcatgatgtttctttcccattccgatggcgaattgatccattattccgcagctgacgccgataaaggaattttccgccgtctgagcgagcttcaccaagtcgagcatatccgcctcaagctcatggcattccttgagaatgaccgccgtaacaagttcaatcgaagccgaagatgacagccccgctccgttcgggatatttccccagaacacaatatcgaagccgtgcggaagggaaaaaccgctgccgagacattccgccatgacccctttcggatagttggcccacccgtcctctttttgataacggatattatcgagactgcattcctttatgcccgcttccttaaattgatgagagtacattctgacgagcctgtcctctctctcccggacggctgcatatgtaccgatcgtcagcgcgcaaggaaagacgtggcccccgttataatccgtatgctctccgatgagattcactctgccgggcgcaaagaaaatgcgcaggtcctccgattccccgaatacatcagcaaacgctttctttattttgtgcttcatacgcatcccctttcaccattacactttcccccggggcgcggaaagaaaccgttatgacacgccctcttctttcgcttttctgaagacgatccacttgctggccgcatagttgacgactacgataatgacgttatctgcgattttcgccaacgtttcgttcatatgaaattgactgaccagaagaatcatcatggcgagatcgatggcgagggacaatacccgcacgctgaaaaaggccgtcaattctttcatcagactccgcatccccgcggtcttttgctgaaatacatacagtttattcgtgacatatgcaaatagaacggacagaatccaagcagcgacggtcgccgccttgtaatccatctcaaatgccgacgtcagaaagtaaaaactgacgatattcacgatggtcgtgaatatccccataatgatatacatcataatttctctgtagcgcatggcagttcctcgctttctgaaagacttttctaaaccttttgtcaaatcaagaagaacgttaccccgattttctgccgctgacaaaaacatagagcgcgtcaaacatgctgcggaaagtaaccggccttcccagcacattggattgcttaatcatcccgtcgatgagcgcgcacatcatgttagcggtatgctcggtatctatatggtcttctattaaatttctcgatttgagccaatttatgtacatggtgctttcttctatccataacttataaagacggatataagcttcatattcactgacgactttgtaagtaggcatatgaacggcaaaagacacaacattccaggcaggcttgctgtttacaaaccgcatcaacaggctggccgcgcttgccgcagcttcacaaagcgtcaacggccgcgctgtttgcttttctaattcgtcgagatagccagtgatgatcctttttttaatctgacgcctgtctaacaaatgcttcagaaaatcttccttgctttcaaaatgaacgtaaaacgcgcctttgctgaaacccgccgctttactgatgtcatcgattgagactgaatcgtaagctctttcaatcaggagatgaaggcctgcgtcaataaaactttcaaatgtttcttctctcttaatttgaaatttgttttttttcattttttaccccagctgtttgatcattcactttatcttacaccgaatcattcttttgcggtattttttatgcaaaaagaatatgctagtcgacgctttgagggtaaatgttaataggtcatatgatttatttttatttgcatactatccagtcagtatttatttgtttattattatacgtaagaattcttgaaggattttggttatttcagtcattttcttagggaataggtaggtgaattcatcttcaatttgggattaccggccaactatgtgtgatatttgttatacattggctgctgtagctgggcaaatcaatttttcaattggaggttcttatgaaaactcatgtaatgaaagatatagatcaagattggcaattgttaattcaagaggctagaatcatgggtttgcacattgacgatgtgaggcgcttcttaaatactgaaaaagcggtgaagaaaaaaacaccaatgaaaaacaccatccgccagcggtaagattacaggcggatccttttactctatgacctgccacagtccgcccgcacccgagttttcaaaggaacagccgcaataagaggggaatcagagaacaaaccgtataccggacaaccattcccgtcctcattccgcaattgaacagccaaacatggtgatatgagatccccccgctgcatatcttgtgtatatgcccatttatgaggtgatacacagatggatacgaatccctattatgatgaaaaacaacagaactactacgaaggcctgaatccttatttattgaacaaaatagacgaaaactggcggacagtgcttgatgtcggctgcggcacaggcaatttaggagcagcgatcgaagaccgcggaataacggtttacggcattgaggcgtatcccgaagccgcaaaaaaggcggaaagcaaattgagccacgtgctttgcggcgacattgaatccgccattcttccgtacgaatcagaacaattcgactgcatgctgttcggagacgttcttgagcaccttatcgacccgtggtccgtgctgaaaaagcttcgtccttatgtaaaaaaagacggcacggtgcttgcgtgcataccgaatgtcggccacatctcagtggtgctggagcttttagccggcaaatggacttacagtgacgccggattaatggatcagacccacctgcgtttttttacccgtgaagagacgctttcattatttaaagccgccggctatgaggtgaaacgcattgaggcgatccgcgttgatcacccctcttatcacaaagccatcgcagcattgcacgaagtatgcgtacagcttggcataaggcatgactttatgacagaagcatcggcgtatcaatatgtgattgaggccgagaggagcatgtaatggattcacattcatttctgtttgtcgtctgtgtgaatgacgagccgctctactcccggtgcaagagccatatcatgcagcttaccgtccccccttcatactccgttgatatcatgccgatatacgattcagcaagcatggcctcgtcctacaacaaagcgctgagacacccctccaaatataaaatttatctgcatcaggatacctttatcattcatcagcatttcctgcatgacatgcttcatatctttcaatctcatcaggagctcggccttctcggtgtcgccggctgcaaaaccctgccgccgaacggtatttggtgggaaagcggacagcggatgggaaaagtgattgaataccgggggaatgcttatcacccgctggactttgagcacggcgatgaagacggcctgtttacgcccgctgacgccattgacggcttgttaatggcggctcaatatgacgtggagtggcgggaggatttgtttcgcggctttcatttttacgacacatcacagtcgcttgaatttcaaaaacacggctatcaagtcggcgtcgcctgccaaaaagacccttggtgccttcatttttgcggcgactcatttgacgccgcggcatatgaagcggacagacaaacatttgtcaaacactatatggcaaagccctctcgctgatcgagagggcttttttcgggttaacgtttattcagttcccgctcaatgatttgttcaaaggtttcctttcccgccgcgccagggattctctcatcgccgatgataaacgtcggcactgccgtaatgccggcttcttcataagcatggcggagcgcttcctgctgtacgtgtctgtacgctcttgtctcaagcgcctctttgaaggcagcgccgtcaagtcctgcttcttccgcaagctttgtcagcacgccaacgtcaccgatattttgttcttcttgaaagaacgcctgaaaaacgcgtgtatggtattcgcttcctttcccatgttcctttgcgaaatgaaagccttcaaatgccaaatccgtgtaaggatgcggtgacacgcgggggaacgtgatttcaacgcctaacgactgcgccatcggctcaatggagtttttccacatctgccgcttggcgggatcattcaccggatcaagtttcggcgaggggctcggacgcaattcaaacggcatccattccacctgtacgtccttgtccttgattgcttcttcaaacgccgctttgccgacaaagcaaaacggacatacataatcagaatatactttaatctgcagtgtcattgtaagtctcctttccttttcattttaagttgtaacatatatagttacaagtgttttttttaaaacaccctccatatggaaggtgtcacgattccagcagcctttgggcgatatattctccttttttacagccgccgggacaggcgaataaggaagagccgatcgtttgtatgtattcattcagcgcatcctttgccgccaaagccttcagcatcgggacaaattggcggtccgggtctttttgaaagcagataaacagcaggcctgcgtcaacatagcccgtcttcggatcaattccgtccgtataggaaaatgcccggcgcaaaatctgtctgccggttgattttgccacgctgacatgcgagtcggcgggaatttgattcagcttcacgggatcggtttcctttttttgtccgaaaggcgcacccgagcttttcacccgaccgaacgtgtcctcttgttccttcaaggatgaacggtcccatatatctaaaaacatcttaattttcctaaacgccatgtacgtgccgcccgtcatccagtccggttctcctgattgaacccaaatgatcgaattcatcaggttttcatccttcgtgctttggttgccggtgccgtctttaaatccgaagaggttgcgcggtgtttctccgtttttcccgccgcttaagaaacctttattgagaaaacggacttcgcacacccccgatgcctgtttcatcaggttgcgcaccgcgtgaaacgccgtttgttcattatccgcgcagacttgtatgacgatatcaccgccgccttgtttcttatcgagcttgtcgttaggcatcggcggaatatcggcgaggtgcttcggttttttatctttcagtccgaagcggtctttcccgtctttctcgaaaaacccggggccgaagccgaaggtaacggtcaaattcgccggtgccagatcctgcgactccccggtatcctgcggaggcatatatttatttttctgttcgcccgacgggacggcgcctgaagtcagcagctgcgtcaggcttgtccattgtttgaaaagggagatgacatcggctttgtcgcttgacatgacatcaagcgccgcaaaatacacatacgtctgatgcgccgttgtgattcctgcttggtgcttcccgtaaaaaggaacgatttgatcacgatcccttttttcatcattcttctttgaagcggtggccgccggtttgaagagcggcgcgagtcctccgaggccgctcgctccgacagcaacggcggcgcccgcgacggcgccccacttcaggacatcccgtctgtggatctgtttttccttgttatgttcatcgctcatgctgcgtcttaactccttttaaagcacatcggcaatcttcgacatggtttcagaaagagccgtcagcttcgtgcttatctctctgatttgatctgtacttaatgtatcacaagacatataagattgatcgcacgttttgtatttcgacatcaaaccttcaaattcgctgaattccgcatcaagtttttccatgacgtcgaaatgatctctcactgcgcgcttttcactgtttcatagagggcttttaagccttcggcgccggcggtgattggttcaggcgtcactttgagagaagcgatagagccgtcaaacgttccggtcgatattgcaagctgattgccctgttcttgacatacggcttatattctccaagtccgtcactgcctttttgcgcacacagaaaaagggccgccctatcgggacagccctgctttggagcgccgaatttcctctgaaaacttgcgcgccgccgcttttggatcttcggcttggctgatggcgctgatcatgctgacgccgtctgcacccgcttcaatgacgggcgccgcgttgtcagccgtaatgccgccgattcctaccatcggaatgctgatgccctgacgccgcacctcttcaatcaatgtaacgccctgcacagcttcagcatctttttttgtttcggtcggatagaccgggcccattccgacgtaatcggctccggcttcttccgcccgcttcacctcggagacgttatgtgctgacacaccgagtatcatatcgccgattgccgctctcgtttcttcggcgtctgcgtcatcctgcccgatatgcactccgtccgccttaaggcgcaaggccaattcgacatcatcattaatgatgaaaggaatcccggcctgcctgcagacatcctgtacctgcttcgcgaacaggacacgtccctcccctgttaaagaaccgctccccttttcccgaaattgaaaaagcgtagcgccgccctcaatggcttttttcaccacggaaacggggtctgcgcttgtattgtttgatcccataataaaataaaccgataacatatccttcatcatttcccgagaaatacgcgtcatttttctgtcaccctttcaattgcggcaagctcggccgcttcttgttctgagatgcttgccagcttgtttaaaagctcaatctggaagctgcccggccccttatgggaggtgtccagagcggcaagctgagcggcgcttccgtatacagaaacggctgaaacggccgcttgcagaacgtcctgtcccgccgcgcagaaggctccgatgacagacgtcagcaggcatcccgcccccgtcaccttcgtcagcagtttatcaccgttatgtacggcatatgtgtcggtgccgtcggagatgacgtcggtttttccggtaatcgcaatgaccgtcttcagcccgcttgctgccgtcttagcgagctgaaccacatctcctccggcttcccccgcatccacgccttttatcttccaatcaggggcgccggcaatattggcgatttccgcggcatttccgcgaatgacggacaagcggacctcctgtatgatcttgcgggctgatgccgtccgaaacggcgtggcgccggcgcctaccggatcaaaaatgaccggaacaccgttttcattggccgattttccggctgcgatcatagcttcaaccgacgccgaactgagggttcctatattcaggacgagcgctcctgcgattttcgccatgtcggctgcctcctcaattgcataagccataacgggcgatgcgccgagcgcgagcagtccgttagcggtgaagttcgtaacgacattattggtaatactgtgaacgagcgggttttgatcccgcactttactcaagtgttgagctgcggtttgtgcgtccatgcttaatcatccttttttctctttttcggattccataaatacgatttcgtatgctccagccaggctctggcggcaaaggacatatagcggtctttccgccaaatgatggctaaatgccacggaatgaccggatgaacgagcggaatggttctgactttgtcaggatcaagaccgcggcagattctttccggcaagaggccgataccgagattggcggataccatttcgctgataaagtcccactgtgacgtttcataaatgacgtgaggcctgaatccggctttcacgcattccgtcataattcgattatgaaggacaaaatcctccctgaaaaatatgaacggctcttctttcaattcgtgaagactgcattctttctcgtcagcgagccgatgtgacggatggacgacgagcataagggtttccttgacgattgtgaacgtatgaaaaatttcttcattcgcgggaagcacgacgaccccgatatcaagcgagccgtcctccaccccttgctgcactttaatagagccgtcctcaacaagctgaaacgtcacatcgggatatgtgacgcgaaagtcaccgagcactctcgggaaaaagccggacccgatcatcggcggaagaccgatgcggacgtgccctttcttcacttccataatatcgttcagctctgacgtcaggttttggaatgactttgtaatttcctgcgcctgcacatacatgctctgcccggcgtcagtcagttcaacttgccggccattgcggtaaaacagcttaatgccgagctccgtctccaggtttttaatcatttttgagattgtcggctgtgaaacatacagcgactgtgaagccttcgtaaagcttttcaaacgggccacttccaaaaaatacgttaagtgccggatatccattacatttcatcctttctatagacaaaaggaatacacattattctttatatgtattttacctatagcaaaaccttctgtacaatataaatataagggaggcatcattatgaaaaaattgctgcttaccgttattcaaatcgctctgctgtttatatttgcgcgtctgatcaattgggtcacggcggctcttcatataaatattcccggcagtataatcgggattgtgattcttttcacattattgcatttcaagattatcaaacttgaatggattgagcttggcgcagcatggctcctcggtgagctgctgctgtttttcatcccgtctgccgtcggagtgattgaatacggagatattatgtctaaattcggcgtaagcattttacttgtcgtcgtcatcagcacatttgtcgtgatggtttcaacaggtacgcttacacagctgatagcaaaaagaaaggagaaaaaacaaacgtgttcatcggaatcataagtttattcttaactgtcttagtatatttgggcgcgaaaaaactctacattcgttttccgcgggtgtatacgtcgccgcttctgattacgcccgctgttttggtcgtactgctgcttcttgtcaatgtcccgtatcagacatacaatctcggcggcggactgctgaccgatatgcttcagccggcaacagtggcgttcgccatcccgctttataaatatttcccgattttaaagaaatacgccgtggaaattattttgaacgtagcggtcggttcatgtatcgccattctgtcaacggcctttatcgcgaaatggttccatctcggcagcagtttagtcgacagtctcgtgccgcgatccgtgacgacgccgattgccatgaacgtttcagaaatgatcggcgggatgccggccgttacagcggttttcgtcattttaacggctttattgggaacgatcatcgggccgatggtcatccgctatttccgcattgataacgaaattgcccggggcgtgctgctcggaactagcgcgcacggagcgggaacatctaaagcatttgagctcagctccgtatcaggaacgatctcaagcgtgtccatgattctcgccgcaattatgacgctgtgcgcggccccgattttgctttcgtttatgtcataaaaggctgctccttacagagcggtctttttttatttgccacgcagattgatttgtctgtccttcataaaaagacgaaaacacgatatgataagatatgaagtgaaaagactgaagaacggatgtgtcatatgaacggccagcagcgaagcagcatcagaaaaggacttgaagtcgatatcgtcctgaaagccgatcagcgttcaggaaagctgacaagaggaatcgtgaaggatattttgacgaactcaagcttccacccgcgcggcattaaggtccgccttgaagacgggcgaatcggccgggtgcagaacattattgaatagaaaagagccggagcttcacgcccggctttttttctttaatttcagcaatgaaatcctcatatgttctccctttatatacaaaaaatctttaaccaactattgactcttacgttgcgtaatactttagagtagccattaaggaggcggcaaacgtgatgggtatgaaagtaaaagaagtagctgaactgattggagtaagcatacgtactctccatcattacgatcaaattggattattgactcctcaggaaacgaccgattccggttatcggctttattctgaagagaatcttgaacagctgcagcagatactatttttcaaggagctcgatttccccttaaaagagattaaagaaatcattaatagtccttcatttaaccgaagggaggcattaattttacaaaagaaaatgttgattgagaaacggaatagagtcgataaaatgattgaaaccatcgataaatcaatcaaacatatgatgggagagatttgcatgacgaacaaagagcggtttgagggaatgaacttcaatcataatctttatgaacaagaagctcgcaaacggtggggtgatcaacctgtcgataaggtaaatattagattgaaaaacatgactgatggtgagcaaaaagatttatctgataagtggactgcaatgttcaataaatttgcactccttattaaccaatctcccaagtccccagacgtacaaacagctatcaaagagtggtttgattttctcaatgaaaattttggtgaatattcttttgatgccttttacggattaggtcaactctatattgaagataaacgcttcactaagaacatcgaccagtatggtgaagggttggcgaagctcatgagtgacgccattacaatttatatagatcatcaaaaaaagggtggtacccattaaaatcattatcgaggatacaatcaggcaatacgaaacgttattttcaatgattgaaaatagagaagattattatcggtattcaatgatgaaaccttttgaagatatgtggaaaaagatgaatgttcccttaaaggcaaagcagcctaacggatatgatgtaatcatggctgcaaatatgctgggctatctgagcatatttgatacggaaaccggaagaaaagcattggagaaactaaaagaaattcaagctcttcaaattgcatatggcactttaactcattgtgtagaatttatccagcaaaaccgcttaaaaataaatgctgatgaaataaggtttgggatgtatctggccaatcaaaaaaagcttgagttacatagagggtattgtggattcggaggaattccgggatttattcaagtttcaatattccccaattcatataacataccgagactgcctgctgtaatcgcacacgaatttcatcataatattcgtttttcgtatttcaattgggattatgggaacgtaacggttggtgattacttaattatagaggggttggcagaatcgtttgccaaagaactttacggagaagctctgttaggtccctgggttacttcttttgaaaaagaagacttagaatactcaaaagaaatcatcaaagactcattaaatgtgaaaggatttgctgaggtcagcagttacatgtttggcgacacctttgcagccgaacaaggttatcagcctgtcggcttatcaccgtttgcaggttatgcggttggctaccaagcggtgcaatccttcatgaaagccaacaatgtggggattagtgaggccactttacttagcacagatgagatactaagtaatagcgggttgtttctttaagatgtgaagattattttatcccgtattaacgcgatgaaagagggttttcttttcccctctttcatcgctataaatggtcattctattttttccgcaagaaaacaaccttcaaatagttcccttctttaaacgcgggaatcgttttgaaatcttccggaagcgtgtattcttccaaaatgtcgtaacgctcatttgtttctttaaaggcggtctctataaagcctttaaatttcttcatattgaaggcgctgctgtttgtcgaagcgacgatgatgccgttttttgcggtgatggcgatcgtttccttcagcagatttttataatctttcgccgcgctgaacgtccgtttttttgtgcgggcgaaagaaggcggatcaaggatgatgaggtcaaactccagcccttttttctccgcatagccgaagtatttgaaaacatccatgactttaatgtcatgcgcctcataatcaattccgttggcgctgaactgttcaatcgtttttgcgagactgcggttggcgacatcgacgctggtcgttttctcagctcctccaagcgccgccgcaacggaaaatgcccccgtataagagaacgtattcagcacccgtctgccgtttgcatacttgtcccgaatcgctttccgcacatgacgctggtctaagaaaatgcccgtcatcgccccgtcgtttaaatccactgcgtaccgtatgccgttttcttgaacaatgaccggaaaatctcctctttcgcctttgacaaaatcgtcgtcttccacgtattgcccggccgtatcgaatcgtttcttttcgtagatcgctttataagaaagctccagtccgtcaatcgcctcaatcatgctgtccttataagcgtaaatgcctttactgtaccattgaatcagcagataaccgtcataaaagtcaatcgtgacgccgccgatgccgtcgccctcaccgttgaacagccggaacgccgtcgtgtcgggtgccttaaacagatgggctctcgcttcagccgcttttttcagcttgtccataaagaaacgtccgtcgatccgttcatctctcgcgcgggacagcacccagccgactcctttattctgcaaaccgtaatagccttttccgataaactcacccttctcggatgtcacatcaaaaagatcgccctctgttaaatgagccgagcttccggacagagcgtctttttcaatcagggggaatccttttttcagctttccggcaaatgtatctttcactgtaagtagcttcattgtgcattcctctttcgttttgctttctcttatcgtaccataaaacatgatcaacaccgcattgtcccgaaaaattcaaaacagggggaaaaccatgacagccaaaagaatcgaccatacaggcattatggtcaaagatattgaaacatccatcgccttttatcaagacgttctcggtatgacgttaaaggatcgtatcactcatacgaacggcattattgaacttgcctttctcggctttcaggaagggccggagacagaaattgagctgatccagggctacagcagcgagcttcccgcagaaggaaaagtccatcatgtcgctttattaactgaagatatcgcggcggagttcacgcatgcgaagcgtcagggcgccgtatttatcgatgaagaaatcacgacgcttccgaacgggtaccgctacttttacattgaaggacctgacggcgaatggatcgaatttttccagcgttaaaaaaacgggcgaaagcgcccgttttttttatgtttcttcagtgacgttttgttccgccgcccgttcctctctccatttttgaagatcccaaattcggaaaaacggataatagatgataaatgtaatcaggagattgatcagctgcatgaccgaaccggagattttcccgcccgtcgccaaataaccggaaatcagcggcggcatcgtccacggcacggcgattcccgccggttttgccaccatccccgtgctcatcccgatgtacgtcgccgtaatggtcaagagcggcgcaatgataaaaggcacgattaacagcggattcatgacgagcggcatcccgaaaataatcggttcgttaatgttaaaaatcgcgggcccgatgccgagacggccgagctgtttcatctgtttgcttctggagcgcacaagcatggtcagcacaagggcaagcgtcgccccgcttccgccgacattaatccatatttgaaagaactgtgtcgtaaaaatgctcggcagcgcttctcccgcctgaaaagccaaacggttggcatccatcgccccgtaccagatcggcgacatgacgccgccgataatggacgcgccgtgtatgccgcacgaccaaagcagcatttgcacgaattcagcgataagacttccgccgagactcccgcccaaaatagacagcggggtgcccagcagatcgcctacgacattgtggaggcttttaaaaggagttatttcaataaacagacgggccagccatacaagcgtaataataatgaaaccggggatgagcgcaacgaacgatttgctgaccgcaggcggcactccgtcaggcattttaatgacgatatttctttgtatgataaaccggtacacttccgtagacagcattgcaatgatcatcgcgacaaacagacctttgcttccgagcagcgaaatcggaatgccgcctcccaccataatctctgttgccgagccgtcaggaataaacggaatctgatacggcgtcgccaataaaaaggcggcaagggcaatggctcccgacgacagggcatccacctcatagctttccgcaagccggtaagcaatcccaaaggcggcgacaagcgccataatatcaaaggacgcattcacgggatacccgagcttttcaacccaattttcaccgaaaagaccagccataaaatcggcataaccgggaatcggaagactcgtcagaatcagaaaaaccgatccgatgatgataagcggcatcgtcaaaataatgccgtcccgcaaagctcttaagtgcctttggccggcgacttttccggcgacaggcatgattttttcttccatgacccgattgaacgtactcatttatcaaaaaccccctttttgagttcattgcgcagatgtcttaaagcattttctccatcatattttggaaacgcttacatttgcatacagaaattttccttatccctcaggaaaaaaagaattccgcactgccgatatataaagaaaaagggggaattgcaatgtatcacaccctgaaaccgataatggccgcggccttgtgtgtcggcctgttctccgccgcggcgcccgcgcacgccgagacgcacgaccgggatgttatcgtggtgtacaaaaatcaaaacggcaaggaatccgccatagacagcggagcggatgtggaacagacctatcagcatctcccggcagtcgccgtgtcagccgattcacaaacggtgaaagacctgaaacaggaccctgacatcttatatgtagaagacaatgtatcctttcaggcagcaggcggttctgatatccgcccgttatcagcggcccaaagcagcagttacgcgctgccgcaatgggatatcgaaccgactcaggtcaagcaggcgtggaaagaaggcttgacgggaaaaaaggtgaaagtggctgtcattgacagcggcatttatcctcatgatgatctgtccattgcgggaggctattccgcagtcagctatacttcctcatacaaagatgacaacggacacgggacgcatgtcgccggaatcattgcggccaaacatgacggatacggcattgacggtattgcgccggatgtccggttatatgcggttaaagcattagacagaaagggtgcaggggatcttaaaagccttcttaaagcgatcgactggtcgatcgccaataaaatggacatcatcaatatgagcctcggaactaacgcagacagcaaaattcttcacgacgccgtagacaaagcatacaaaaaaggaatcgtaattgtagccgccgcaggaaacgacggcaacaaaaaacccgtcaattatccgggcgcctacagcagcgtaacgccagtctcagcgtcaactgaaaaaaacgggctcgcggctttttccacgaccggaaaacaaattgaatttgccgcacccggcaccaatattacgagcacgtatctgaatcaaatgtacgccacggctgacggcacatctcaagccgcgccccacgtcaccggcatgttcgcgctgctcaggcagaaatatcccgaggaaacaaatacacagctccggcagcagatgcagcaaaacgtcaaagatctgggcgctcccggacgtgacagccgattcgggtacggcctggtgcaatatcatgtaaagcaaaagagctatgccgaacgggccgtaataaaagcggaaaagacgaaaaagcaggcagatatcaatcaagcaaaaacggccgtcagcaagctgtccaagtcaaagggaaaaaccgctctcgagtcccggatcaataaagttcagacggcaagaaatgtgacggacgcaagagacaaagtccggactgccgaaaaacaaaagaaaaaaaccgccgtcaatgccgcacaaagcgccattcgcaaattaccggccggttcagagaaaaaagggctgcaaaagcggctgaacgctgtcaactcaagccttttgaaaacagctgaggccagcgtcaagcaggcggaaaaaaagacctctgaggccagcaccgcaaaagcccaaaaagcagtcagcgaaatccagccgggaaaagaaaaaaacgctctggaaaaacggcttgaccggataaaagataaactcaaccggcagcaggctagagacaaagtaaaaacggctgaaaaaaccaagacgaaaaaagcaaaatcagcggcgcaaacggcagtcagccgattgaagccgtctgccgaaaagaccagcctgcaaaaacgcgtgcgtgcgattcgggtgaaatagcaaaaaacgcttatgagccggataacggcttcacaagcgtttcatcacacctgcctattggttcatggccgggcggtcgatcgtgttccatttcgtaaaggacatatatcggaaataatgatcacgatacgggtgcgaggtgcctgtattccaaggcttgtcgctgccgcagaaatggacgatggccggttcggcacgtgtttctctgtaacgtatacggtcgatcagttcaggaggcgttttctcattcatgataatatgcgtctgcgcgttccagcgcggatgcagttcatgccattgatcatataagatcgcgttaagcgcgtcctgatcatgaaacacgagaaaatcctccgagctgttttcgttaataaaatcaatcaccttttcggaaatattttgttttctccaaggttcgaaatctataatcataatgccggaattaaaatacttggcagtttcgctgatattcatttttttcagtctttcatgctgtccggcgtcttctaccgccgcaactattgccggggaaatatccaagtcccataaaaccgaaatatcttccatcacaattgcatcgcaatcaatgtaaatcatccgctttacggactcatccttaattaaatcagggatggaaatgcggtaataagccgcttttgtaatgtggctgctttcgactgcatgcttgtattgatcagcgtctacttctaaaaattcaagcggcgtcccgaatgacatcgcggtctgttcaagcttgtccttgttttcggcagtaattccgccgtcaatcacatataatttcgcatcccttgttttatccatattcatcaataaagaagcgaacatcccacccaaatgacgagcataatgatcatcggcacatgatacgatatgcattgtttcattctttcccactgatattcatctccctttttgttgtacaaatgtctttcccttttttaaaaaagtaaacctcgatcttacacattttttctgcgggaatgtgctgtttgcaatttgatatcttttgcattccctgttcaaattcaatcaggatttcagcctgaatcatcgtcagaatatatcgcgcaggaaagcgaaaacacgtaaacataaaaacaaccagccggactgcacataaaagcggtccggctggttgtgatgcgtcgatcgtttaatcgacttctttcttaatcccaagcatcttttcgtctaaataatgggcaatgtccgccgcttccttcagctcgtcggtcagatgctttgggacttcgttatttaatttgtaataaattttatgttcaagactcgcccaaaaatccatggcgatggtgcggatttgaatttccgccttcacatattccacacgattcgtcaaataaacgggaatttcaatgatcaaatgcagactgcggtagccgttcggcttcggttgtttgatataatccttcacctttacgatcttcaggtccttatgctgcttcaaaacctcagcgacattataaatatcggaaataaaggaacagataatcctgacacccgcaatatcatgaatatgctctttcatttcctgcgtcgtcacatcgcagcctttgcgcatcagtttattgacgatactctcaaaacttttcacgcgtgattttgtatgctcgatcggttatgcccgtgaatcagattatattcctggctgatgatagaaaacttcgtatccagctcatctaaagcgaatttataaactaataattcatttttccaatcttccatgaccgttttcaaatcatccatatgggctgttgacaagtccatttttttcatctccttgctttgctgtccgtatatgagacgtgtcagtccgcggtcaggttctttacaatatcgtgaagattatgtcataaaaaaaaagcaaatgccggttatggcatttgccctttcatttgatcagcggaaataactgatcaggagtccgatggaaagcaggaatccgaagaatgtattggtttgcgccgttgatttcatcgcaataatcatgttcatcggcatttcgtttttcacaaagcctttcacggcctgaacgggtttcggcacgctcaggaagaccaggaacagccacgggcttgtgtaacccatgatgacaagaccgatgatccagatgtaagcgatggcaaaagatgcggccagtatcatgacggcccctctatgccccatcaaaatggccagggttttacgtccgccctttttatcttcctcaatatcacggatattgttggacagattaatggctccgaccaagatggcgatcgggatggaaatcaaaatgctctgttcattaattctgcctgtctgaatgaagaaagaaataaggacaaatacagagcccatgcaaatgccggagaacagttccccgaacggtgtatacgcaatcggcagcgggccgcccgtatacagatagccgatcagcatgccggcaaggccgatagccgcaagccaccagctgctgctcatgcagatataaacaccgagcacgagggcaatcgcataagagccgagcgccagctgcagaattgtttccggcttcatgccgtggcggacgatcgctccgccgataccgacggaatcctccgtatctaaaccgcgtttaaaatcgtaatattcattgaataagttcgtggcgatctggatccaaaggcaggaaaacagcatggccaaaaacagcaggaaatcaacctttacgtaaaacatcgccaatacggtgccgagaagtacgggcacaaacgatgccgtcaatgtatgagggcgggttagctgccacaaaatgcggcccatgctttctttctcgggcgtcttttggctgccccccatattgttttgattcattttcctcttcctttctattaaaaggctttcacagtcagccgataacagtagtgttgaattggggttttcacgttttctgctaccttatctatcataataatttcttcctcatttcacaagatgcggcgctttatcggctatcctgccggaaacggcttttcgcccttctccattggggttcggcacaagcctgcttaagaaaaagccgccaaaatttttttacctcgtttatatttacgataagttaaaaatcccgcctgaacagcacctttttagtatgatcatttgctaatttatacatgcgtgttttccatccttttgtttctcattcatttttaaggaaattttaagcttaggatattagacatattttgaaactttttgttaatctaatcgtcatatactggtgtaattattgaatacgcggggaaggaattttgaatatgatgcaaaaattaaaacgtgcttatgaaaatacattgatcaaatggacgtttcatacgggcttttattttctgatattagtattgctcttttggatgtatggatttcatacagcgaataccggcacttatatttacaacgatttctaatcggggaggataactatgaaactacttgatgctataaaaacatacgcagacgccaagccgcaggccgaagcgtttcgttccttagatcattccctcacttacggggaattatgggatttgtcggagcgggttgcgtccggcattcaaaaacatacagctgacggttcgaaagcgcctgtcctggtttacggacatatggagccgaatatgatcgtttctttcttaggaagcgtcaaagcgggccgcccttacatccctgtcgatgtttccattccggcggagcggatcgtcaaaatcattgaaagctcaggcgcagagctgcttatcagcgtatcgggcgatgcagtcgatacgggaagcaatctgattaaaaccgttacgcccgaagagcttgcagctgacggagatgcagacctcagccgtgagaattgggtaaaagagctggacacgttttacattatttacacgtccggcagcacgggaaatccgaagggcgtgcagatatcggctgataacctgcaaagcttcactgactggatctgcagggattttcctgtgggcgggggtaagacattcttaaaccaagctccgttttcttttgatttatctgtcatggacattttcccgtcgcttcaaacgggaggtacgctgcattgcgtaacgaaagacaaaatcaataaaccgaaagtactatttgaagagctggagaaatccaaactgaacgtctggacatcgacgccgtctttcgtccaaatgtgtctgatggaccccggctttacgcaggagctcctgcctgaggcagaagtatttatgttttgcggagaagcgcttccggctgccgtggcacaggagctgttaaaccgttttccgaaggcccgcgtattcaatacatacggcccgactgaaacaacggttgccgtcacctccgttgaaattacgcagcagattatcgatgaacatgaatctctgcccgtcggttttgcaaaacccgatatgaatatcttcatcatggatgaaaacgggaataagcttccggacggagaaaaaggggaaatcatcatcgccggcccgagcgtgagcaaaggctatctcggtgaaccgtctctgacggaaaaagcgtttttctcaattgacggccagtgggcatatcacacgggtgatgccggttatgttcaggatggtcagattttctgccaaggacgccttgatttccagattaagcttcacggctaccgcatggagctggaggaaatcgaagtacatgtaaggcagtctcaatatgtgcgcacggcggttgtcatcccgtatcagcctaacggacctgtcgaatatttaattgccgccatcgtgcctgaaaaacatgattttgaaaaagaattccagctgacaagcgccattaagaaagaactggccgcttcgcttccggcctacatgattccgagaaaattcatttatcaggatcacattcaaatgactgcgaacggaaaaatcgaccgtaaacgcattggcgaagaggttcttgtatgacgccttacagctcgtttttcttctttatcttacttggaatccttcttttgccgacgattattttagggctgaacggcaagagattccaaggatacaacatgtttatatccatcatcgtattggctttgattttcgcgcatgatctgcacggcgtgatcgcactatgtatctttacgctgtggcaggtgcttttaatcaggggttatctcgcttacagactgaaagccaacagcggctttgtcttcagtatggccgtgatcgcgtccattttacccctgtttttatctaaattatggccgtttttctttccgccggagcctcatcacccggttcataacctgatcagtttcttaggaatttcttatttgacatttaaaggcgtccagctgatcatggaaacgagagacggactgattaaagaaaaaatgccgcttcaccgccttttgtactttattatgtttttcccgaccatttcttccggtccgatcgacagataccgcagatttgccaaggacgaacagaaagtatggacaaagggagaatacgctgatttactgtataccggcattcataaaatttttatcggtttcttgtacaaattcattatcggatatgcgattaacacgtatttcattatgaatctgtctcatatcacccacagcaaactgtggggtaatgtgctgtacatgtacggatacagcttgtacctgttttttgattttgcgggttacacgatgtttgccgtcggtgtaagctatatcatgggtatcaaatctccggaaaactttaataagccgtttatcagcaaaaacattaaagacttctggaaccgctggcacatgtccttatccttctggttcagagactacgtatttatgcgctttgtattctggatgacaaagaaaaaatggataaagaaccggatggccgtctcgaacatcgggtatttcctgctgttcatgctgatgggcgtctggcacggactcgctctgcaatatattgtatacggcctgtaccacgccgtattaatgaccgggtataacttttttgagaaatggaataagaaatacaagtggctgcccgccaatcgttttacggcctttttagccatcgtcatcacattccatttcgtatgtttcggattttatattttctcaggaaaaccatttcatcactaaaggagattgaaaacacatggaatttaaacaggaagtattagacgtattagctgaagtttgtcaggaggacgctgtgaaagaaaatcctgatattgaaatctttgaagaaggactgcttgattctttcggaactgtagaactgctggtcgccatcgaaaaccgcttcggcattacagtgccgatcactgaatttgaccgtgacgagtggaatacgccaaacaacattgtaaacaaactgactgagttgaagtaaatgaaaaagcgtttctttggaccaattattttagcgttcgtcctgtttgtcggagctatcgcagttccggcttcatggcttacgcgcttcattcctgaaaaacgtgtcgaagagtcggcggcagccttaaatccaaatatgttccaggggctctatcttcaaaacaaaatgttcgaagactcgaagtatctgccgattttcggttcttccgagctttcaagactggatgagtttcacccgtccaactatttccaagtgaacaaccaaggctttacgccttatcttgtcggaaaaggcggggaccaatccttgatacacgccgtgaactttgcggcgcattatcagcagctgaaaggcaaaaaactggtattcattgtttctccgcaatggtttatcaaaaaaggttctgatgaacagcactttgcgccgaatttttcatcacttcaggcattggatttagcatttaataaccagattgatcccgcggtcaaaaagaacatgatgaagcgcatgctccgttttaaagtcgttcagcatgatgccgtcctttctgaattgtacaagggaatggtcaacggacaatcatggaaagtgaaagcggtcatgccggccgccaaagcttattattctctgcttgagaaaaaagatctttattattcaatgggagaaaacaagggccctgaacggacgatctctgaaaacctgaaagggaaatcgtggtcagagttaaaaacagccgccgctcaattaggagaacggagctccaagtccaatcctttctatatcgatgacgcttcttataaaaagattaagaagaaagtaaagagagtgaaaggaatcaacaaaggaagaacatacgccaaatcagtcgaataccacgactttgaggatatgctggacattctgaaagatgccggcgctgaaccgatgttcgtggttattccggtcaacggaaaatggtatgactacaccggcttcccgaaaaaaggccggactgattactacaaaaaagtcactaagcaaattaaagcgaagggctttcaggttgccgacttatccgggcacgaatatgatccgtactttatgaaagacaccatccatatcgcctggaagggctgggtgtacgtcgataaagcaatggagcagttttacaaaaacggcaaggtgacggttcactgagcacggtgatgacagaatacgtaaaaacgaacacgcaggggggcattctctcccctgctttttatgtgatttgattttttcacaaatttgaggaaaactattgcgaatatttgttgaaggtatacaatagaatataaattattttcaaataagtttgacaataacaccaatagggagacagaacattatgaaacaagatattcgtgttgaattgacttcagccaaaaaaccgaaaccggacccccatgaccttgcgttcggcagaattttcaccgaccatatgtttgttatggattacgatgccgatcaaggctggtatgatccgagaattatcccttatcagtccatctcaatggatcctgcggccatggtttatcattacggccaaaccgtttttgaagggcttaaagcgtatgtaacgaaggatcaggaagtgcttctgttcagaccggagaaaaatatggagcgcctgaaccaatcaaatgaccgcctttgcatcccgctcattgatgaagagcttgttcttgaaggcctgaaacagctcgtagccatcgacaaagactggattccgaaagcggaaggcacttccctttatatccgtccgtttatcattgcgactgagcctttcctcggtgtagcggcatcccatacgtacaagctgtttatcatcctttccccggtcggctcttattacaaagaaggcattaaaccggtaaaaatcgccgtggaaaacgaattcgtgcgcgccgtcaaaggcggcaccggaaacgcgaaaaccgccggcaactacgcatcaagcctgaaagcgcagcaggttgcggaagagaagggattttcccaggttttatggcttgacggcattgagaaaaaatacatcgaagaagtcggcagcatgaacatcttcttcaaaatcagcggcgaaatcgtgacgccggaactgaacggaagcattcttgaaggaattacgagaaattccgtcatcacccttctcaaacattggggactgactgtgtctgagcggaagatttcgatcgatgaaatcatccaggcgcatcgtgacggccgattggaagaaacattcggaaccggtacggcggcggtcatttctccggtcggcgaattgatctggaatgatgaaagtcttgtcatcggcagcggtgaaaccggagagatctcgaagaaattgtatgataccattacaggcattcaaaaaggcgcggaagccgacgtgttcggctggacgacggaagtcgcctcactaagcgaatcaaaataagcaaaaaacccggaatcgaatccgggtttttttactgctcttatgcttcaatcgacttaaagaaatgaggcagatgttctttgtgggcctcaagcatttcatccagaatggcctttgccacggagtctgacgggacgagagggttgatcgtcatcgcaagtagcgccgtttgataatctcccgtgacggctgcttcagcggcgacacgctcaaatgatttgatttgctggacgagtccgcggacagacaccggcagatcaccgacggcgatcggtttcggaccgtctttcgtcataacacagttcacttcgaccgctgagtcattcggaatgctggcgatcgcgccgttgttgatcgtattgacgggctggatatcatgtttgtcgttatagatggagctgatcaggttgcaggccgcgtcactgtagtacgctccgccccgtttttcaagctgcggcggtttgatggcgagattcggatctttgtacagttcgaacagttctttctcaaccttctgcacgacctcggcgcgtgtgccctccgtctgtgacgcttctatttcatgctcgagcatttctttcgttttgaaataatagcggtggtagccgcaaggaatcagatcgagcgccttcaggaattcaggctcccattccgcccctgaaatatttttcatcgtcatggcgtttttcgggtctcccatggcttcaatgacttgatctttcacgctgacgccgtctaagaaaacatctaatccgaagaccatgtgattcagcccggcaaattgcacttcgatccggctgacatccacgtccaatgcttttgcgacgcccattttaatgccgatcggcacattgcagaggccgacgacttttgtgagattcgagtagcggagcaaggcctcggtaaccatgccggcagggtttgtgaaattcacgagccatgcattcggacaaagctcttcgatgtctttcgcgatttccagaataaccgggatggtgcgcagccctttgaataaaccgcccggaccgtttgtctcctggccgattacgccgtattttaacggaatccgttcgtctttggcgcgggcctcaagaaggccgacgcggaattgagtcgttacgaaatccgcatccttcaaagcttctctccggtcaagcgtcaggtgaatctctatcggaacacccgctttttcgaccatgcgttttgcaagcgtgccgacaatattgagttttttctcgccttcgggaatgtcgacgagccataattctctgacaggcagttcctcatagcgtttaatgatgccttccacaagctccggtgtatagcttgaacctccgccgatcgttacaattttaattccttttgtcatatttttgctcccccttgcagactcactttttcgtaaatctcgactaactcagcggccaagtctttcacggtcatggcattcattaaatgatcttgcgcatgcaccatcaaaagcgtcatgtctgttttttctccgccggcttcattttggatcagttctgtctgataatgatgggcttcggtcagttcccttgcggcttcctgaagcttttcttccgccatggctctgtccccccgctttgcggcggcaatggcttccattgatgcgcttctgccgttgccgccatgcaggatgatctgaaaaatggtctgttccattttttcattcatgtgtttcactccctttctctacagcacggctttttcgtctccctgtacggctggcgcctgcgattgttcaagttcgttttcttctttcagcttttgcgaatcccacattctgaagaacggatagtacacgataaaggctgtgatgatgttaatcgcctgcatgacagcccctgatatttttccgcccgtggcaagatagccggagaaaatcggcggcatcgtccatgggacggcaatgccggcaggtttggcgacgaggccagtgctcatgccgatataggtaaggaccagtgtgacaagcggcgtgataatgaacggaatgagaagcatcgggttcatgacgatcggcattccgaaaataatcggctcattaatattaaagacggccggcccgatggcgagtttcccaagctgcttcatctgcttgcttcgcgaacggagaaacatggtgaccacgagcgccagtgtcgcgccgcttccgccgatgttgatccagatttcaaaaaactgctgggtgaaaatattcggaagcgcatcgcccgcctgaaacgcaatccggttggcatccatcgctccgaaccagatcggcgccatgacgccgccgactatgttcgccccgtgtaatccgcacgcccacaagagcatttgaaccgcttcggctatcaggcttccgccgagacttcccccaagaatcgagagcggtgtacccagtacaacgcttacaatgttatgaaggctttcaaacggtgtcgcttcgacaattaaacgcgcgccccagatcagaaagatgacggcaaaaccgggaattaaagcgataaacgatttgctgaccgcaggaggcacgccgtccggcattttgaagacgaaattccgctggatgatcaggcggtaaatttccgtcgacagcatggcgatgatcatcgcaacaaacagccctttgcttcccatgagagacagcgggatgccgccgccgaccatgatttcctctttggcgccggaaggcagaaacggaactttgtacggcgttgccaagagaaacgccgccaaagatatcgcaccggccgataatgcatccaccccgtatttttcggccaggcggtaggcgattccgaaagcggcgacaagacccatgatttcaaaggtcgcatcaaccggatattgcagtttttgagaccaggcgcttccgaacgtttttgccatgaaatccgcatatcccggaatcggcaggttgccgatgatcagaaaaaacgaaccgatgatgataagcggcatggtgaggatgatcccgtcacgcaatgcttgcagatgccgctgggaggcaatttttccggcaatgggcatgactttctcttctaaaaactggttcaccttattcacacggcccgcccctttctacgatgcgtttccgagctgttccgctgatttcagaacctccgctccgttgcatgtgccgtaatggacggtattgatgacttcaaccggcactccttttgattcacccaattttttcagctgcggaagcaaataacggacttgaggcccaagcagcaatacgtccgctttatcaatatgctggttgactgaatcgcctgacaccgcccagattttatattcttttccttgttcctgcgcgcttttttccatcttggtgacgagtaagcttgttgacatccctgctgcacaaacgagtaatatattcatgtaaaagacctcctgaaagtttgatattttgtatgtctcgatgttagtaccatcatattatgaaatcgctttcataactactcaggctttttccgctgttaacggaaaaaaggtgtatcccggtctttctctgatcgtttgtctctgaatactcgtaaaacctcctgataggctgtgcattttaagagacggcttaccgcggccggatcatctaacatcccgccgagccatttgtacatatgctggaggtcggctttgctttctttctcgacgcagagcaggcagacaaattggacacgcttatccgcccagtcaatcggcttcttcagcgtgcataccgcccaaaacgtcgtgtctgtctgcggaacgagcgggtgcggaatcgccgtaagattgccgaaactcgtaggagaaatcgcttccctttcaaaaatagaatcggtcagagaatcagaagcgaggccggcttctgcaacctgctgtccgagaaaacggatgacgtcctccttcgtctccagatcctgctgcaaaaataccagctccggtttcagaaagttcaattgttcccgcttttcttccagcatggcgtcgatttttgtaaaatccccgccgcccaacagcgtatgaaccttcaacacgggaacgggcaggtcttttttgatcggcactgtgctgaccacaaaatcaatcgactcaaaggaaagctggtcaaggctgcagtaatcagccgttccgacgatttcaagacgctttgcgaaccgggaacggagcttttctcttaaaagctgtgcgctgccggcgccggacgcacagacaatcagacagcgtttaggcggccgttccgtctttctcctttcgatggcggctccgaaatgaagcgccaaatatccgatctcattctcatgaatatcaatgccggtttgctccttgatcacgattcccgcaatcactcccgcttcaaatgcgagcggataattttcctttatggcggagagcatcgggtttctcaggttcattccgtaccggtttcggttaatcgccggcttgatgtggagcgcaagacccgctttcagctcattgtcgtccgtgattccgagcttcagctcccgctcaatggcttcgatcatggcctccgtcaaacggctggtttccccgtctatcagccttgtaagctcttttccttccagttgtgactgggtcatgcgctttgtcccgagcaggtgaatggcgatataggcggtttcctgttcgggaaaggtgaccgaaagcgccgattcaagctcttttacgatggcttccgctgactgatattctgtttcaagcttaatatcatgaagatcttccggaatgagagatacatagttttctgtccggattcgtttgcaggcaatggcgatatggatgatgagattgttcaggccgaagaaagaaagcgggatcttatggtttcgaacctgcttcataatggctgtgcggatcacatgaatgtcgtctttcggcagaataccggccttttcactcaggagatcaggctcaggctcgcggtcgtccactaagtattccgccatacaataacggaggcggagctcttcgccgcgcagcttaaagccgtagttcggccttgtttccaaaatgatgtcataggggcggagccgttttttgacttcttttaaatcagattgaagtgtggatttactgatgaatagttcttccgccaagtcatccagcttgaggtagccgtcggccagaagcattcttttcataaggtaatctatccgttcatcgggaaaaatcggcacggtgctgttctgctggaaattgtcctgaagccagtttttaaacggctgctcattccggatcagcagcttatagccgctccctctgacagattgaatggatgcgccgtgtttttctacaatggtttgcagttcctttatgtcattgcggaccgtccgcgtcgttacctttacatttgcagcgatgactgagcttgtaaccggtgtttcagcagctaaaagcaagcgcaaaagttcacgaagccgcccatgaagcatgagaaaaacctcctatcagatcagatgcagacgtgaaaaatgggcaaaaagaatgaggaaggggtaaatgtatgtaaattctataatggggaggatttcaagtcaatgcggcaatccgatgccaagcccgtaaaaaaacagccggatcagccggctgttcgggatgcggacatgcggttccgcttagatgccttccgttcttttatgatttttctgatgatcggatagatgacgggcgcccatttgataatcgttttgaaaaattttttcaatgtctgaatcccctttcttttaccttgtctttcccctgttatcagcgtttataaacatggtcagcgtgagacataccggttccctgtcacccaatagcgccacggataatcccgggcttctccgctgttgtcaatcccgattctcgggcctgttgatatatgctcaggcgtaaagccctccgtaatatacagcggcggttccgtgatcatgccgccgtagtcgttcattgaaatgcccatcgccttcgtcagttttcccgggccgtttgtccactctctcgggggtctgcccggtctcctgctctccatcaggaactgtccttcatgaggctccgccgccctgattaacacggcctgcggaatgccgatgtccgcggcgacgacgttcattaatgtatgagtgtgcatgacgtatgtataaatgcggcccgcctcatggaacataatttccgtccgtttcgtgcgccggttgccgaagctgtgcgccgcccggtcttccgctcccatataagcttccgtttccacgataaaacctgaagccgttccctcatccgtctccttcaccaagagacagccgagcaataaaggggcaagctccactgacggtctctggtaaaattcaatcggcaaaggctttcgttctcctgccatttgcctccctcctttctgaatatagcgatttcctctttcacgtttttcacttcttttttacaatataaacatgagagaaaaaaggacattattgttgaacgctctattgcgttttgaaaatcggctcggtataatatgatggttcaaatgaaaatgattctcatgttcaataaataccggaccatgatcataaaagtaggtgaattgatttttgagcgattctgtcaggtccgcaaaccgtctgatcagcatcttaaaaaacggggttttcttcctgatcgcggtgatcgggctgcttgtatctatttttttcgccgtctcattcggtgcgaaagacattactttacatacggtttggtcggctgttgctgattacaatccgaatataacgggccagcagatcattcatgaattgcgtcttccgagggtgctcggggcggccgttacaggagccgcttttgccgcagccggcgccctcatgcagggtgtcacgagaaacccgcttgccgattcgggtgtcttaggcgtaaacgcgggcgccatgtttgttgttgcgctcagttttgcttttttccctcatttgtcatacgccctgctgatggtgatgtcatttttgggagcactggcaagcaccagcttgattttctttatcagtgcggcgggaaaaggcagcatgacacctttaaaggtaacgcttgccggggcggtcgtggccgctcttttacattcactcagtaccggtgtggcgatttattacgatttaagccaggatttggccttctggtacgccggcggggtgtcagggatcaagtgggctcatttacaagtccttgttcccgtgattgcgatcttcatcattctcgcgacattcatgggccggtccgtcacccttctctcaatgggaaatgacgtggcggcgaatttaggggtgaacacggctctgacgcgtgccgccggattaatgatcgccgtcgttcttgccggtgtgtctgtttctgctgccggcgcgatcggctttgtcgggctggttattccccatatcgcgcgaaagatcgtcggcgttacgtacaggctgattattccgatgtccgcgttactcggcgcgattctattgattttggctgacctggcctcgcgcacggtcagtcccccgagggaattggcgataggcattatggtcgcacttgtcggtgtccctttctttctttatattgcccgcaaggaagggagagacttataaatgaaagtgcagaaagaaacaaaaaaagcggcggcggcaggactcattctgctggtcatcgccgtttgcattattctgatcgggctgcatacgggctcattccggctttctcctctcacggtgggaaaaacgctgttcggatacggcacgtttcaaagcacaaccgttttattcgattaccggcttccccggattctggtgacgatgctggccggcatcggtttaggagtgtcgggcgctattttgcagggtgtatcccgaaatccgcttgccgatccgggcattctcggactgcatgccggcgcttccttcggtttgatgatgtatatcacgttctttcattccctggaggcgcaggcatcgatgttcatcccgctgtttacgtttgcgggcggaacactcgccgccctgctgatcgtagtgcttacgtacgacaggctgaacggttttttaacgatccgcatgctgttagtcgggatcgccgtttccgcgggcttcagcgccgttacattgtttatgtcgctgcgcctgaatgaagaaacttatacattcgcttcccgctggctggtgggaaacgtctggggcagggattggattcacgtgtggtcgctattgccctggatcggcattctcgcaccgcttgcatggctgaacgcccggtctttgaatattttaatgctcggtgaccaggcagccgcggggctcggcgcacacgtgcagagaaaaaggatcatgctgatcgccatagcggtcggcttgtcctgcgcgagcgtcgcgatggccgggggaatcggctttatcggctttgccgcccctcacttggcaagacggctcgtcggcaccatgcatcagcatattatcccgattgcgggattaatcggactcgtcattcttgtcgcggcagacaccatcggccggtctttgtttcagccgaacgccattccggccggcgtggttgcggcagccatcggcgcgccgtattttctctatctcgtcatgaaaatcaaatcataaaacaaggagtattcccatgaaaaaaataattgcgctcgtcagtttcatgtgtattttcttattggctgcctgccaatccgactcaacacagccggagtcaaaaaagaaatccggcgatcataaaatcgcttcgatgtccattcacctgacaaatgatctgctggctctcggcgttacacctgccggttccgtcgtgggcggagaattgaaagattttctccctcatgtgaaaaatcagctgaaagacacgaaaaaactcggacctgcctcagacccggatatggaagctttacttgagctgaatccagacaacatttatcttgataaagaatttgcggggaaagatgtgtcaaaatacaagaaaatcggaaacacacacgttttcgaccttgataaaggcacttggcgcgatcatttaaaagatatcggaaaaatcgtcaaccgtgaaaaagaagcgaaaacatttattcaagattacgaagatgaaacaaaacaagtcagatccatgatgaataaggaattagggaaaaacgccaaagtcatggcgatccgcgtgaacgcaaaagagcttcgcgtcttcagcacacgccgtccgatgggaccgattctgtttgacgatctgaagctgaaaccggctgacggcattaaagaaatgaacacctcccgcccttatgaagtcatttctcaagaagtgctgcctgattacaacgcagatgcgattttcgtcgtcgttaacagagacgacaaatcacagcaagcctataaagaattgcaaaaaagcgctgtatggaaagggctgaaggccgtgaaagcaaaccacgtctataaaattgccgatcagccttggcttgattattcagcactgggaaataaattagcaatggatgaagcgaaaaaactgttccaaaaataaacacgagccggttttgcaaaaagtgcaaggccggcttttttatattgtcgtttacttatataaacatctgcttatataatagtgtaaaaaaggagtgagcgcatggaacgaaggcatcatgctttaagttccgaagggatcagccagtgcctcaaacttctaagcgacccgacgaggcttttgatgctgaagcttctgaaggataaggaatattgtgtctgcgagctgacagctatttttcatataagtcagcccggcatcagccagcacttgaggaagttaaagaacgccggccttgtgcgggaaagacgcgagggccagtggcggtactatgccattcatccgtccggtccggaatacgcgctggtttgctcgattctgcagcagatagatgaaaaggacgaagttttacagacattgcggcaaaaagaagtcactgttacatgccggtaagggggatatattcttgggagttgcggttttatcagcgctgatttttatgctgacacttgtgtttgtcatatggcagccgaaacatatatcaatcggctggtctgcctgcggcggggcggtcctcgctttgatcgccggagcagtcagcctgcacgatatcgcggaagtgacgggaatcgtctggaatgcgacacttgcctttatcgccattattatcatttcattgattcttgacagtatcggtttttttgagtgggccgcgctgcatatggccatggcggccaagggcagcgggctgcggatgtttctctatgtgtcggtcttaggggctgttgtctccgccctgtttgccaatgacggagcggcgctcattttgaccccgatcgtactggcgatggtgcgggctttgaatttacctgaaaagctggtttttccttttattatcgccggaggattcatcgccgacaccacctcgcttccgctcgttgtaagcaatttggtcaatattgtatccgccgattactttcatatcggatacattgaatatgcatcacgcatgctggtgcccaaccttttttctctggcggcaagcattttggtgctgtatctctatttcagaaaaaacattccgaaacggtatgacaccggtcttgtgaaacatccggcatccgcgattaaggatgaacgccttttccggttatcgtgggctgtgttggccgttttattgatcggatatttcgtcagcgaactgctgtcgatacccgtttccttcgttgccggctccatcgcggtcatttttctcattctggcgcagcgaagccccgccgtccctgcgaaacaagtcatcaaggacgccccgtgggccatcgtgtttttttctgtcggcatgtatgttgtcgtgtacggcttgcggaatgccggactgacggatcttctttctcagcttatacagaaagcggcggatcacggtttgtttgcgggcacactcggaatggggtttatcgcggcgatcctctcctccgttatgaataacctgccgacggtgatgattgacgccatagccatcagcggaacggacgctcacgggctgatgagagaagcattgatttacgcgaatgttatcggttcggacctcgggccgaagatcacgccgatcgggtcgctggcgacgttgttatggctccacgtgctgagccggaaaaacgtgaaaatttcctggggaatgtatttcaagacaggtctgatattaaccattccgacgttattcatcaccctgatcggactttatttatggctgttatggctcgcttgagatgaaaaaccttttaagttgaatcttaaaaggtttttttgtgtcaaaaatccgaaaagtaaaacttttatattttaaaagtatagacatttagttttaaaagattataatattcatgaaaacgttttaactttatgaaagaagggatttctcatgaaaagaattttattagcctgcagctcaggcatgtccaccagccttcttgttacgaaaatgcagaattacgcccgctccatcggtgaggaagccgagatttgggcagtcggacaggataaagcaaaagaagcgatgaaagatgcagacgtcgtactgatcggcccgcagatgagttttttaaaaggtgagcttcagaaagaggcggacccgcttcacatcaccgttgatgtgattgatatgatggcatacggcatgggagacggcaaaaaagcatacgaacaggccgttgccttgattgagaacaaataaaggaggcgataagcatggaaacgtacacggatgaacagatcagttttcagctgattcttcacagcggcaatgcccgcagcaatattattcaatcgatacgcgcatataaagacggccggacagatgagtcagacacctttctgacaaaggctgaagaagaactggggaaagcgcacgacatccattttcagatgattcaaaaagaagccggcggcgccaagacggatgtctctctgctttttatgcatgctgaagaccacttaatgtcagcgctttcaatgaaagagctcgtcaaagaaatgctcgatttatttcaatcaaagaatttataaaaagccgggggtgaagacgtgtttgagaaaatcagccaattccttgttccgatcgcgggcaaattaaacaataaccgctacttgcaagtcttacgggatgcttttatgctggcgtttccgctgaccattttcggttcggtgttcgtcgtgctgacgaacctgccgtttttaaacaaaatcatgagcagctccgccctgtctgtctttcaatccggatttggcggcgcttcgacggcgacgatggggattatgtccatttttgtcgtcttcgggatcggctattacctttccaaaagctacgaagtggaggccgtattcggcggagcgatcgcattggtttcttttctgctgctcaccccgttcgttttagagccggaaacgggcaaagcggtcgcaggcgtcattccggttgaccggcttggagcaaaagggatgtttctcggcatgatgaccgcatttttgtcaggtgaaatctacagaagaatcgttcagagaaacttaacgattaagatgcctgccggtgttcctccggctgttgctaaatcgttcgccgcattgattccggcttttatcacgcttaccgtcttcctcttgatcaatgcggctgtcacccagatctttcacaccaatctgcatgatgtcatttatcatacggttcaagccccgcttgtcggactcggaagcggtatcattcctacattaatcgctgttttctttattcagattttatggtttttcggacttcacggacaaatcattatcaattccgtgatggacccgatttggaatacattacaggtcgaaaatttagctgcgtatacagcgggaaaagagattccccatattatttctaagccgtttatggagatttacaccgtcggaatgggcggaaccggaatgacattggccatagtgatcgccatcttgctttttatgaaaagcaaacagatgaaacagatatccaaactcggtctcgcgccgggcatcttcaacgtcaatgagccggttattttcggtttgccgatcgtgatgaacccgatcattatcattccgtgggtcatcgcgccgatggttgtcacccttgtcacctacctggccatgtcggcggggatcgtgccccctcctaccggcgtgaccgtgccttggaccgtcccccttttcattaacgggattatggcgaccaattccgtcatgggcggcattatgcagctggtcaacctctgtattgtgtttgtcatctggttcccgtttcttaaagcgctggacaaattaaacatggcaaaggaaaaagaagctgagaccgagcagcatgcccgggatgacagcatgagtatgtaatcaaaatcgcagtaagggagagaaatcaattgactgaatcaaatattcaatatcgttttccggaaggattctggtgggggtcttccgcctccgccacccaaacagaaggcgccgctgacagagacggaaaaagccaaaacatatgggagtactggtatgaaaaagagccgagccgtttttttaacggcgtcggccccggcgacacgtcacgtttttacgatcaatacaaggaggatatccggctgatgaaagaaatcggccataactccttccggctgtctatttcctggtcaagattgattccggacggaactggcgaggtcaatcagaaagcggtcgcgttttatcaggacgtcatcaatgaaatgcttgcccatcgcattgagccgtttgtcaatttgtttcactttgacatgccgctcgcccttcagcgtaaggggggctgggtcagccggaacaccgttgacgcgtttgaacattacgccaaaacatgcttttcgctattcggtgacaaggtgaaaaaatggttcactcacaacgagccgattgtgccgattgaaggcggctacttatacgactttcactacccgaatcacgttaattttcaagaagcagtgcaggccggtttccataccctgctgtcgaatgcaagggctgtcaaagcctacagagaattgaaacaggacggacaaatcggaatcattctgaatttgacgccttcttatccgagaagctcacatcctgaagatgtcaaagcgtcccggattgccgacgcctttttcaaccgctcatttttagatcccgccgtaaagggcgaatttcctgaggagcttgtcgagattctcaaggcggaaggctttctgccgcgttatgagaaagaagatctccgcctcattcaggagcatacggtcgacctgttaggcgtgaactactaccagccgaggcgcgtcaaggcaaaagaacatgttccgaatccgcatgcccctttcctgcctgagcgtttcttcgacccgtatgtcatgcccggccggaaaatgaaccctcaccgcgggtgggaaatttacgaaaaaggaatctacgacattctcaccaatctcagagaacattacggaaatatcgagtgttttatttccgagaacggcatgggagtagaaggcgaggaacgcttccgcgatgaaaacggcatcattcaggatgattacaggattgaatttatccaggaacatctcaaatgggtgcatcgggccatcggagaaggttcaaatgtaaaaggctatcacctgtggactttcatggacaactggtcttggacaaatgcttataaaaaccgctacggctttgtatctgtcaatctggaaaacgggggcgaacgaaccgtcaaaaaaagcggccgctggttcaaatccgtttccgatcaaaacggattttaacagatgaggagggacggccatgcttggaggtattgaagccggcggcacgaaatttgtctgtgccgccggacaaagagacggcaccattctggacagagcagagtttccgacgggagaaccggatgacacactcagacaggtcatccgttactttaaagatttcccgatagaagccatcggcatcgggtcgttcggaccgattgatatccgtcctgacagtcaaacatacgggtgcatcaccgcgacgccgaagacagcctggcggaactgccctattcttcaaacgatcaaaagcgctctgggtattcccgcaggcttcaccaccgacgttaatgcagcggcgctcggagaagcttctttcggcgcggccaaaaacacggacagctgcctctatttgacggtcggcacgggcatcggcgcgggcgccattatgaacggcagatttgttcaagggctgtctcatcctgaaatgggccacatttatgtcagaagacatccggacgacggctacaaaggcaattgcccataccatacagattgtctggaaggtctcgcggcaggccccgccattgagaaacgctgggggaaaaaagcatttttgctcacggatcagcaggaagtgtgggagcttgagggctattatattgccgaagcgcttgtgcagtatattctcatactttcgccggaaaagatcattctcggcgggggcgttatgaaccagcggcagctgttctcttctatccgtcagcacgtgaaaaagcggctgaatcaatatattgatctgcccgatattgaacacttcatcgttccccctcaattagggattcactccggcgcggccggttcgctcgtattggcggagcaggtcttagaagcggcaaaccgggaggcgggaaaatgacgaaactcttatttttggaaccggtttttaaagaaagattatggggcgggacgaagctgcgcgatacattcgggtatgagattccttctgagcggacgggagagtgctgggcgatttcagctcatccgcacggcacatccattgtgcggaacgggcctttttccggaacatcattacagcgtctctggagtgaacaccctgacctgttcggacatccgaaagaagaggcttttcccctgctcacaaaaattcttgacgcaaatatggacttatccgtgcaggttcatccggatgacgcatatgcacatcggcatgaaaacggagaactcggaaaaacggaatgctggtacgtgttggactgcaaaaaagacgcggagctcattttagggcatcgcgcccaaacaaaagaagatttcgttcggcttattgaacgaaacgagtgggatcacctgctccgccgcatccccattaagcccggcgactttttctatgtcccgagcggcacactgcatgctttatgcgaaggtacgctcgttcttgaaatccagcaaagctctgatgccacctaccggctttacgactatgaccggacggatgggaacgggaataaacgcgagcttcatcttcagaaagcaattgacgtaacaggcattccgcataccgatgaaaatgtaaaaagcacaaagcatcggatcggagatgctctgattacgatactcgccgaaacacctttcttttcagtttatcaatgggatgtgagcgggaaagcatcattccccgcacccggccggtatttactcgcaagcgtcacgaaaggacgcggagaactggatggatgccccattcacaaaggcgatcactttatcgtgccggcggattccggagattttgttatagaaggagattgtgaggttatcgtttcacatccttcatcatcttaaaaatcaggaggtcttttatatgctcaaaaagttagcagtctgcctgtctatcgttttattactcttaggagccgccagcccgatatcggctcacaccgtttatcccgtcaacccaaatgcccagcagacgacaaaagatatcatgaactggctggcgcacctgcccaaccgttcagaaaacagggtcatgtccggggcgttcggcgggtacagcgatgtcactttttcaatgacagaggaaaaccgcttgaaaaacgcgacgggacagtctcccgccatctacggctgtgactatgggagaggatggcttgaaacagcggatatcaccgattctatcgattacagctgcaacagcagcttaatctcatactggaaaagcggcggcctccctcaggtcagcctgcatctcgcaaatccggcttttccatccggaaactataaaacagccatctcaaacagccagtacaaaaacattctggacccttcaactgttgaaggaaaacggcttgaggcgctgctcagcaaaatcgccgacggccttactcagctgaaaaatcaaggcgtcaccgttctgttcagaccgctgcatgaaatgaacggcgagtggttctggtgggggctgacaggctacaaccaaaaagacacggaaagaatctcgctgtacaaagagctttacaagaagatataccgctatatgacagagacaagagggttggataaccttttgtgggtgtattcgccggatgccaacagagactttaaggcagacttttacccaggctcatcttatgtggatattaccggtctggacgcttacttcactgatccgtatgcgatatcaggctatgatgaaatgctgtctctgaaaaaaccgtttgcctttgccgaaaccggtccgtccggcaatatcggaagctttgattatgctgcttttatcaaggcgatcaggcaaaaataccccgagaccacgtactttttgacatgggatgaacaattaagtccggcggccaatcaaggcgcgcaaagcctttatcaaaacagctggacgctgaacaagggcgaaatatggaacggcgggtccttgacgccgatcgcggaataaccgcttcttttgaaaatcggttttaagaaacggctctgctgggcatattgttaccgttcaaaaaggagggttcaacaatggaaaataacaaaaacagcgaagaaacgctttccagtaagacgaccggtaaaggcgagtcagaagacacgctgacaaaccggcagggccatccggtcactgacaaccagaatgtcaggacagtcggcaatagaggaccgacgacattggagaattatgattttttggagaaaatcagccactttgaccgcgaacggattcccgagcgcgtcgttcacgcgcgcggcgccggcgcacacggatactttgaggcgtacggaagttttggagacgaggagatttctacatacacaagagcgaaagtgtttcaaaagaaaggaatgaaaactccggcgtttgtgcggttttctaccgtcaaccacggaaagcattccccggaaacattgcgtgatccccgggggtttgccgttaagctttataccgaagacggcaactgggatctggtcggcaacaacttgaaaatcttttttatccgtgatccgctgaagttcccggatcttgtgcacgcatttcagcctgatcccgttacgaacattcaggacggcgagcgtattttcgacttcatttcccaatcaccggaagcgactcatatgatcactttcttgttttcgccgtggggcatcccggccaactaccggcagatgcagggctcaggcgtccatgcctacaaatgggtcaatgaagaaggaaaagccgtgctcgtcaaatatcactttgaaccgaaacagggcatccgcaacctgacacagaaggaagcggaagagattcaggggaaaaactttaaccatgcgacacaggatttgtatgaagcgattgaaaaaggcgattaccctgagtgggaagtgtatgcgcaaatcatgactgatgacgaacaccccgagctggattttgatccgcttgatccgaccaagctgtggtataaagacgatttcccttggaagccgatcggtaaattggttctgaacaaaaacccggaaaactaccatgccgaggtggaacaagcgtcattcggaacgggcgtgcttgtggacggccttgatttttcggatgacaaattacttcaggggcggacattctcctattcagatacccagcggtaccgcgtcggcgcaaactacctgcagcttccgatcaactcgccgaaaaagcatgtcgccaccaaccaggaaggcgggcaaatgcagtatcgggtcgatcgggcagaaggacaaaacccgcacgtcaactatgagccgtccattatgggaggactcaacgaagcaaagcaggatgggaaagaccatacacctcatgtcgaaggcgatgtgaagcgggaagcgatcgaccggtcgaataacttcggccaggccggagaaacataccgcagattttcggaatttgaacggaacgaattgatcacaaacctggtcaatacgctttcttcctgccggaaagacattcaggatcaaatgattgagaatttcacaaaagcagatccggactacggaaaacgtgtggcggaagggctgaaaaaagcctccgaaagcaacagcggcgggccgatcggcactactgatacagcacaagccgcaaaacaggctgaacaggaaagccatccgtctgatccgtattaaataaaaaaacaggacaatcgcgtcctgttttttttgagctaattcagctcctgtatattctgctccgccgcggccgcaaatactttcggctccggacggtcaagatcttcatggaataaacttactttgtgaatctgccggttgtcgtacagatgaaagtagtagttcccggtgtcacagcacatgaccgacgtatactgcgtataatcaatttcattctcctctgtgatcaccgcgccttttggaatattcacattggacagcacgtgaaaagcggccgtaacgccatccgtttcatgagcggcaggctctaaatgctctttcagataagcggctctgatgaatcgggatggcggcgtgtaatcaccgggaagcccgatcgttccagatccttggccgaaagcggttaatgtcattccgcccaatgttttgctttctgactgctgcggcctgattccgatataatggcgcagattggtcacatgccaaggaaattccggactgttggtcatcactccgggtttgttgtcatatactttcattccctccggtgtcggctcgatgacaatgcagccgcccgtgcggtctgataaaatccaatgaagaggcagcaccgtatccaataacattaacttcttctctacaatcgtcagcattgagagcttttcctttatgtcttcaagagattcacagtttgataaggcccaggtgacaaactcatgaggagcgatgtgacaggtgccctcccgttccgctttctcgtatcccgcaaagcccggaaaatacagcgtcgcacacgacagccctttttcatttacgccgtcggcaaacagaacattgccgagatttctccccatgccgataaatgcgtatttcgtcttatgcatcctgccgtcagcttcgcttttccagctgtactgacgaggataaagcacgacgtccgtcccgagctgaaatgcaaaatccatcgttcgcgccaataggtgattaccgtctgtcgttttcaatgtaagacttgtacacatatcatcaatccccttttcattaatgaaatttacacaaagtaaactattcttccagcttaacgaataatggctccattcgtcaaaagattgacacatttctccttaatacatattagtccgtaagcatatccatgccttttaaaccctggcaaatcgttttggcggcagtgtttgttccgttttttcaaaaaaattttgaacggctgtcaacgaggctttacattgtttttcctgcatgctggaatttgtaaacggcaggtcaatctgttaagctatgtctttatgttaaagaagaacatacggaggagattatctattgaaagtagaaaggcgaacgattgaacatattccgcatgacgaaagacacggaaaggctaaagatttattccccgtctggttcggggctaatatgcatattacgacgttagtcacaggcacactgcccgttacaatgggactcgatctcttttggagtatcgccgccattattatcgggacctttatcggcgcaatctttatggcgtctcattccgcacaaggacctcagctcggaattccgcaaatgattcaaagccgcgcgcaattcggcgtgatcggagcgattctgcccctctttttggtcatgtttatctacctgggcttctttgcgagcagtacgattctcgcagccggtacactgagcagctttgtaccgattccggcttcatggtgtattatcggcttaagcgccatctgttttttactcacgatctacggtcatgatctgattcacaaaatgcagaaaatcctctcttggacctcctttgccgttttttttgctgcaacgattcttatttttcaactgccgattccttcgggaagctgggtgcccggctcattagacctgcctgttttcctagtggcggtcagcgcggtggccacatggcagctggcatacgcgccatatgtcgcagattattcccgttatctgccggtcaaaacaccggcatcgcatactttttggtacagctacgcaggtacgtcagtcagttccatctggatgatgcttctcggcgccattttgacgacggcgctcccggaatttaccgctaatgcgggaaatgagattgtccgattgttcggtccgttttcctttattatgctgatcatcgtcctgttcgggcaaatggcgatcaacgtctttaatttatacggagcctttatgtctacgacgactaccttagagccgtttttaaaactgaaggtgacgccgaaaacgagagtggtaatgatcctttgtgtgacggcagcaggtactgtattaagtctcttgggccaaagcaatttcatggaactgtttttaaatttcatctttttcatcagttatttcttaattccatggacggcgatcaacctcgtggattactattttatccgccgcggaaaataccacgtcaaatcgatgtttgacgtcaacgggcaatacggcagggtcaattggattacagcggccgccttcgttttgtcgattatattagaaatcccattcatcaatacatccttctacatcgggccgctcgctgaaatattcggcggaggcgacattgcctgggtcatcggcctggccgttccgtcgctgctgtattatgtcctgatgaaatcaagggtaaaacaacaagaggcgccttctctatgaagacgccttttctttattcatattccttccatacacgcggcagcagttcagaaagttcgtgcgccaataaggtatgggcggagcgctctttcgtccataactccgcacattcaccgtgaaggcggacggcgttcaatacggcatgcttcgggtcttgatgacagcacagcatgccgagaatcattcccgtcagcgtgtcgccggtcccgccttttgcaagcgcgccgtttccggttgtattcctgcggcattccccgtcgggaaaagcgataatggtttcgtttcctttcaggacaatcgtggcatgaagccgctccgcccattccgcggcatatcccgctctgttctgctgaatctcttgaatcggaaggcctgtcattctggaaaattcgccgggatgaggcgtcaagatcacgggggctttcctctttggataggttcttttcgttatggcgcccgcgtccagtatgacgggataatcggcagaaagcagctgatcagccgcctgctgcacttcgtctgtttgaagaaggcccggcccgatggcagcggcccggatggtttccccgggctggcccgccgcggcttttttccagccgtcccgccagtacgtcgcttccggcagcaccgggacgataagcggaatgacgcctgccgatgtaccgatgacgagcttgccgacaccgcttctcatcgcgcccaatccggccagaagggcggctcccggcatgtcatcgctcccggccagcaataacgccgtcccgaacgttcctttatggctgtctgcctcccgttgcggcagcgtatctttcacatcctgttccgtccaatccattatattcatctctgtacctcctcttctgtctcctatttatattccaaacaagaagagattttaaaccgcacaaaaaaaacagccgctcgtttgcggctgtttatgttctgatcggaacatcaagacggtaaagcttccggtaccgttcgttttctgcaagcagctcttgatgggttccttccatttctgcttttccattttctaaaaagacgattttatcagctgtttccacacccgctaaatggtgtgtaatccagaggatcgttttctctttaaagacatcaaaaatcgtatcaagcaattcgcgttcagtgaccgcatcaaggccgaccgtcggttcatcaaggataatgaccggcgtgtcttggagcagaatacgggcaagcgcgatccgctgccgttccccgcctgagaaacgaatccccgtctcctgcacggacgtttcatatccgtcaggcagtgattcaatataatcatgcagcttcacttgccgcgccgcacgcttaacatcttcatcactcgccttgccgtttccgagccggatattgttcataatgctcgtgttaaagagatgaggtttctgattcaaaacggccaccgctgaggaaatctgctcctgcacggccgcagtttccagcccgttcagcatcactttgcccgaatcgggaactaaggcgccttcaattaaagcgagagaggtcgacttaccggaaccgctcctgccgagcaacgccattttttcaccttggcggagagtgaaggaaaaacggtcaagcacatgactgtgctgatcataagaaaacgtcacgttatcaaatgtaagtgtcacatcagatacatccagtttctcatccgtctgcttcacctcacgacttcgcagctccggagccgccttactcattcttttgatggaatcctgataagaaggcacttccgtcagcgcatccgaaaggggcagaaacgcctccgtcaatggaaatacgacaagcacaaaggccgcgatcatcgtgttggcgatgctgccgtccgcatactgacccgccgtccagaacagcatgatcaatatgaagccgccgacaagacattgcgcggcgagatcacgccatcttgtaaaccgctgacgtttgctttcaaggtcaaaccatgccttctctttctcttcataagaggaaataaaggccgcctggcgtcccgaaaacatccagtcgctcacgccgagcacggcatctgtcagccggctgtagagcatattccggccgcttttcagcctcatgtttttcgctctcgtcacaagaagcgacacaaccggaaacaatacaaccaatataaacaggtaaatcgccgcaaaagcggcaaacggccaggaaaaaaagccgagtccgataacggaggccgcatacagcagcaaagcggaaaccgccgggaaaatcgtttttaaaaacgcatcctgcaaatgctcaatatcctcagccaaaatgccgagcatgtcgcccgtccgaaaacgggatgaaagcatgagcgaggccggctccagcatattgtaaagccgcaccctcatgtcggacacgattttcaaaatgatatggtgccccgtcagacgctcggcgtaccgtgagactgaacgggcaatcccgaaggtccgcacggctacaatcggaacgtacaccagcaggatattctcaggcctagtcgccgacttagagatcaaaaaaccggaagtgaacatgagaaaggccgccgaaaaaatcgtcaccgcgcctaaaaaaatcacaagaacaaacaaacgggcattttgcttcatatacggcagaatccattcttcttttctcatgttctttcccccagttgcgcctttacaagtttggcgtatacgccttgtttcgccatcaattcgtcatgggtgccgatttccgccaccgcgccgtcatcaagcacgataatttcatccatctcaagcatccagtgaagacggtgagtggccagaaaaacaagcttattttcaaacaggtctttcatcgtttcttttatttcatattctgtttcaatatcaaggtgagcggtcggctcatccaaaaggagaatcggccggtttcctaaaaaggctctggccagcgcgacacgctgagcctgccctccgctgagcgcccgtccgccctcgccgatccggccgtcaagaccgccgggcagatcacggatcagtccggaaagacccgccgatatagcggcctgcgccgtgtcctcacgcgaagcatcaggatgataaaaccggatattattcaaaagcgtgtcatcaaaaatatacgggtgctgcggaatataaagcagctgcttctgccagccgtccgactgcagatgcgagcgggattcaccgtttaccttgatctcaccggacgcaggctctaaaaagccgcccagcacatcaatgagtgtcgattttcccgcaccgctttccccgataatcccgattttcttcttccctttgaaggacagatgaaattcagacatcgattctcggacggacaaacgcgtaagctgtaattcatccccgtcagtccacgtatcaagttcgagcggcttttcttctttaaaaccgggctgcgccaaaatcgcttgaatggttttccccgcctcctgcccgtttaacgtcgcgtggtaatcatttcccacttcgcggaccgggagaaaatattcaggcgcgagaatgagcgcggtcaatgccggcccgagcagaatttgtccgtctatcagccgcaagccgagaaacaccgccactgtcgccaccgacagcatcgtaaagaaatccagggcgaatgatgataaaaacgcgacccggagcgtgctcatcgtcgccttgcggtatctctcactgacatgaaagatatttttactgtgtgatttgcttaatcctaaaaaccgcaatgtctccagtccgcggagcgaatccacgaaatgattggaaagcgtctgataggacttccattggcgatcggcttttttctgtgccacaagtccgagcagaatcataaatacaatcaaaatcggaagcgcaagaatcagaatcaatgccgatgttttatcctgaaaaaacacgtaaataacaacggccgccggcacaatcgccatgctgaccattttcggcagaaacagctctaaataacggcggaactggctgatgccttccatcgccagcgtcaccatccggcctgtcccctcttttttcgcaaagcgggggccgagacggaacaattgctcaagaaatcttttccttaagtctgcgccggtttgcgcggcatattggtacacgattttctgccggaccgttgtcaccgcatgccggaccaaaaacgcaagcaggaaaaagccgataaccggataaagagaagcaatccgcttcccgttaaataatccggttaccgcctggctcagccattccgcctgcaagatgatggcggccgtttgtataatcgttaatcccgtaatgatcgcaagaatccgcttcattcctttataaagaaacaggtcttttcccattaataagtcataggctccttatggctgacgcgtttccggaagacataatagctccagatctgactgccgataacaaacggcagcagagtcagtgcggcaattgtcatgaccttaagtgaataatcaccggaagacgcgttagctactgttaagtcatacgcgcttttcagcgagctgaccatgacgcgcgggaacagagagataaaaatcatcgcaactgtcaaagcaagacccgcgccggtcataccgaatgcccagccgtcttttttcttgctcatgaacacaacggcaagaacgttgcagatgacaatcagcacgaataccggaatcgtgatgtttgcccggcgtgtaaacatatccgtatcgtatgcagacatcgcaaagaaagcaagtacaacaagaaagataacaccgattacgcgttttgccatttttctcgcacgctcttgtaaatcaccgatcgtgcgcagggtgataaacattaaaccgtgcaggaatgaaagaagggtgacggccgctccgccaagaacggaatacacgttcacaatatctgaaaaacctgcgtgaatgttcatatgtccgtcaatcggcacaccgcggaacaagcttgtgaaaataagtccgaatacaaatggcgggataaggctgccgaagaaaatcacccagtcccatgttttgacccatttcagattattcacttggccgcggaattcaaatgccacgccgcgccccatcaaggcaagaagaatgatgataaacggaatgtaatatccgctcagcatcgtcgcataccagttcgggaatgccgcgaagatcgctcccgtacctgtgataagccacacctcattcgcatcccagaacgggccgatggtgttaaccagcactctgcgttctaattcattatggccaagaaatcgggtcgaaatgccgacaccgaagtcaaaaccctctaaaaagaaaaatccgacaaacaaaactgaaacgagtataaaccaaagatcatgaagtgaccccatggtagacctcctgactgaacggatccgttgatacaggaacatccttatgatcatcatggtccgcaccttttttaatttcacgaacgaataggaaaacaagcagcgcgcctaaaatcaagtacatgacgccgaagctgataattgaaaacagcagagatcccgtcgttacgttaggagaaacggattgtgcggtcgtcaattgtcccatgaccgtccacggctggcgtccgatttcagtcataatccaaccggcagagttcgcaatgaatggaaatgcgatcagcgcgatcatgccccgtaaataccacttgctcgtatgaagttttttgcggcggttcagaataaaaccggcaatcgcggcaaaaatcataagcgcgcccgctcccgccataatgcggaaactccagaacgtcgttttaacaggcgggatatagtcgccttttccgtacgttttttcgtattctttttgaagtgttttcatccctttcacactgccgctgaacttctggtaagccaagtagctcagtgcgtaaggaattgaaatttctgatgtgtttttttctttattcgtatcaatattcgcaaaagccgtccacgcggcaggatcaccgctgtcatcccaaagcgcttcactggcagccattttcatcggctgcgattccattaaatgctcagcctgcatatgtccgctgaacgcaacgccgataccggcgatcagaccgacaatcatcgaaagcttgaaagatttatggaagaaaggcacttcttttttcttcaataatttaaatgcgctgacaccggcgataaagaaagcacccgtcgcaagcgccccgaaaatgacgtgagggaattcaacccaaagctgagggtttgtcaaaagtgccccgaaatcattcatttccgcgcggccgtttttaatcgcaaagccgaccggctcctgcatgaatgagttcgccgtcaaaatccagaaagatgacataatcgttccgaaggacacaagccaaatgcaaagcaaatgcacttttttagataaacggtcccagccgaaaatccataatccgataaaaatagactccataaaaaacgccaaaagcgcttcaaccgcaagcggagctccaaatacgtctccgacaaaacgggaataatcagaccagttcaatccgaactggaattcctgaagaatccctgtgacgacgccgacagcgaagttaattaaaaagagatgcccccaaaatttagccattttgagataggtctcttgttttttgacaacataaagcgtctccatcaaagcaaccataaacacaagcccgatagacaaaggcacaaacaagaagtgaaacaatgttgtagatgcaaattgaatgcgggctaataccaactcactcatgatgtttttcctccaatctggtaaattgctcaacatttcacaaacacagcaaaatcattgctcggtatttcacaaaaaatgatatatttgctcaatgtttcacaaattcgtcaaaactattgaaatatcagcctgtacaccctgggggacagcggctgtcatagaaatgattcaatatcattactttacaacgattcagcctaaaaaaaaagatcaatatacctaaaataaggctgaaattgtgaccgattattgtcggatttgtagagattttatgtcagcacctaggatatttgtccctttgatatcgtacctcttttttattcgtgtggcgaacaaaatgcttttctcgatgaaaaagcccgccaaatcgccattttgagaaagaaaatgtgaagaaagcatgccctctagtaaattcataatatatgaacaatttaaattttttagtatactttaaatggggatattttttcactacataacgactgggggaacaagcatgggagaacttcaaccaaaattgcaaacggattcaatccaaaaacaggaacggactgataactggtttgccagagcaatgaatataagaatcggcattattcctcttcctatctatatcctgcttttcttgcttattacggtgtttgtcatgagccgtgatgtaaaaagcgacattctgacatcaattgccgtcatgagttttttcggatttaccttcggccagatcggaaaatccattccgatcgtgcgttccatcggcggccctgcgattctcgcaacctttattccatccgctgtcgtctactaccacttgcttccgaaagacattattacttcaacaacagaattcacagaaagctccaactttctctatctatttattgccggtatcgtcgtcggcagtattcttgggatgaaaagagagacgctcgtcaaagctttcgtcaagatttttattccgctgatcgccggctcgatcgcggccgccatcgtcggcttatgcgtcgggacgcttctcgggctcggctttcagcacacactgctttatattgtcgttccgattatggcggggggtgtcggtgaaggcgcgattcctttatccatcggctactccgacattatgccgatgtcccagggagacgcctttgcgcttgtgctgccgtccatcatgctcggcagcctgtgcgccattatgttatcgggtttgctgaatgtcatcgggaaacgcaaaccggaatggacgggcaacgggaaggttgataagtctgattattccgctcccgcattggaacagccggccaatgataaaacgtttgatttgtcctttttcgcttcgggcggtattttagcggtttccctctatttggtcggcatgctggcgcatgatttctttcagcttccggctcctgtcgtgatgctcgtccttgccgttctcattaagctgttcaggctggcgccggcttcgattgaaaacggagccttcggcgtctcgcgctttttctcgacagccgtgacctatccgctcttatttgcgatcggcgtttcaatgacaccgtgggacaagctgattgcggcgtttacgatcagcaacatcattaccattttatcaatcgtcgtcacgatgatggccgtcggttttctgaccggaaaatggctgaatctgtacccgattgagacggcgattattaatgcctgccattccggccagggcggcaccggcgacgtcgcgatcttgagcgccgctgaacggcttgagcttatgccgttcgcccaagtgtcgaccagaatcggcggagcgattaccgtgagcgtcacccttctgctgcttcatcaattctattaaactgaaaaaagcctccgcatgatgcggaggctctgttatttcatcacattttgaatataagagccgaatgccgcgccggacatgcccggcgacacacggacgcggtgaagcccgtaaagcccctgatctcttgacgccgctcccggctccgtcgtgaccgccatacggtagcctgacgcggcggcggcttttaatgtttccttattatatcgtccgacagggtagctgatcatagacgtccgctgcccgaacatttgatcaaataaacgcttagagtccttcatttcacgtcgctgctgctgcggtgtaagcccgttcaattcgagatggttcatcgtatggctctgaatggaaatgccgtgggcggccatctccttcatctgcttctcagtcagatgattcttgtgcccgataaagtttccgatcataaagattgtcgctttcatcttgtatttctttaaaatgggataggccgctttcacattgtcggtatagccgtcatcaaatgtgatcagaacacatttttcacgcggctccttatcctccgtcagcatcagataggcctcttcaggagtcatcgtataatagccgtgatcatgaagccacttcatatgctgccggaattcttccttcggcacacgcaggctgtttccctcagaaatgctgtggtacatcagaatcggcagtcttgccgttcctttcgttttaacccaggcggacgtatccggctcttttttgatttggcgctttacagactttttatcgtggtgcgcttctgccttcggaatgctttgttcggcgcttgcctcatggcccgagcaggcggcaagcgtaaacacggcagccaaaaggcacacgcacatgatcatgcgtttcatcgttttcctgctttctgtcttctatttactttttatatcggttatgcgtcataaattgttacatcaaaaaagccggacatccagctgtccggctttgcattatgagcggattcttatttctgtttcactgtcaaaaaagtgagctttattcatgtcgaaagcgacggtcaattcttcaccggcatgaatgtcatggcgggcgtcaatccgggcgataaaatcctgatccccgatccgggaataaaccataatttctgacccgagcaattccgcgacattgattttagctgtgatggatgaattcttataggattctaccacaatcagctcatcatgtatgtcttccgggcggatgccaaagataacatctttgccggcataccctttttcccggagcattttcattttcccttccggcacgctgagagcggctgaaccgatctgaatggcgccgtccgtcagcttccctttgaaaaagttcatcgccggggagccgatgaacccgccgacaaatacgttttccggatgttcatacacgtctttcggcgtgccgatctgctgaatttttccgtccttcatgacgacgatgcgtgtcgccatcgtcaatgcttctgtttggtcgtgcgtcacatagattgtggttgtttgcagcctttgatgcagcttaataatttctgcccgcatctgcacccgaagctttgcgtccagatttgacagcggctcatccattaaaaacactttggcgtccctgacaatcgcccggcctaatgcaacccgctgccgctgcccgccggagagcgccttcggtttacggtgcagatactctgtgagccccagcattttcgccgcttcttcgacccgtttttttatctccggtttcggcatcttcctcagcttcagaccgaaagcgatattatcatagaccgtcatgtgcggatataacgcataattttggaacaccatggcgatatccctgtctttaggagcgatgtcattcactctcgtgtcaccgatatagaaatcgcccttcgtaatgtcttccagcccggcaaccatccgcaatgttgtcgacttgccgcaccccgacggaccgacaaacacaataaactctttatctttaatatgaaggttaaaatcatcgacagccgcttctttttgatcgtaatacttataaatatgctccagccgaagttccgccatgtcatctcccccttttttgcaaacgctttcttaaataggattgtaacagcgtcaggcggcggcggatataggcaatgttcataaaaaaagtccgctgccttcgtgcacatttcccatttaatgtgatttttcatactgcagacaaatgaaataagccagcagggcgccctgatatgtcttaatatcaatacccgagcgttccgcaaatttatcaatccgatattgaagactgttgcggtgcaaatgcagtcttttcgatgtgagcgacatgttcgagttatgttcaataaaagtctgaatcgtatgcttcagctccggttctttctgaaacagcagcaccgcttcttcgtgaagcaaggctgagagcttttctctgctttcttccgtgagcatggccggaaataccgtttccgcggtcagcgtgctcagctgcgggagatgacgccggccaatctgacaatattgctgttctctccgataatgaaggcgcagacgttctcccgcgccgtaataccttccgatgaaaaaacggacactgaaataaaaatcgccttcgagaatcttcacaaaagatgcgatgtcatccgaatctggcgcttccagcttttcttcctccacaatcacgccctgatcccttcccgtccggacaactgtatatgaaaccggccagaaatggcgcagcgcttccgtaaatgccccccagtcccgttctcccaataagtcataatggataaaacggacacgcggctccttgacatcaggcaccggaccttcttccagcagaaaacgccgccacctctttgctgccgccgtctccggaaaaaaaacgcctttttcttcagcgggcgccaaaaatgattccagaagcagtttctccttcggggtaatatcctccttcggaatggcgacatagacccgccttttctcatcataaaagcaaaagacatcctccgccgtacagcacgtatcagacaacacagccctcgggtaaattgccaataacgggttcatatgcgctcctttctatcgctctatcatattttcagtataaaacgtccggccgattgtatccacttcgttttaagaaacagctttcaggctatttcccgggaaacggatataaccgcttctgccggcataagaaaaaaaccctccgcgcaggcagagggatcctttttatttagagatatcgacgaagccttcaccaaagacgtcacgcacatcatgaacaatgacaaacgcttttgtatcacagcttttaataatttttttgagcatggaaagctcttgtttctggatgacgatatataaaatttccttcgactgccccgtgtaatttcctttacccgacagcagcgtgacccctctgtccataagcgtgttgacctgttcagcgatttcgtgcttatgctcagatataatcgtcactgcttttttcgtattcaggccttcaatgataaagtccatcaccttcgttccgatgtacagcataacaatggtaaacatcattttttctgcaccgatgatgaaataagaactgaagacgacaatcagatcaaagaacaaaagcgcatagctgatattccaatcgagatatttgttcgcaatcctcgccaaaatggcagaacccgcagtcgtgcctccgactcgaataatgatcccgattccgacaccggcaaacacacccgcaaaaatagtattaataatgagttcatgtgaaggcgagtgccaatcatgcgtcagatgcagaaacagtgagtttgcgacaacggtaatgatcgtataaagcgttgtttttccgtctaaaaatttgtatccgataatcaataagatcccgttcaaaatgatattcgtcaccccgggcgaccattcaaacacatagtacaaaatcagggtgattcccgttaccccgccctctccaagatcattcggaatggcgaataaattaacggccaaagcaaagataaaagccccaataatcagcatcagcacatccagcaatctctttttcatcccagacactccctttatataaaatcaaaaaagcccgggagagcactcttcattaaaagagcagaaactcccgggcttttatcccaacgtgtcacagcaggaacctgctgtgtgttttctctcggtccagaccaattcagcattgcggaaccctagaaaaccactgttttttatgttcagtttttgtatatctttcaagattatacgggaaatcaagaacatgttcaaccactcttttttcaataaacgtataaaaaatatgaacgatctgccgatactaaaaaaggcactaaaatacatgactaaaaaatcattaaaatactttttttctcaaaatattattgactataggttattttacaggcattatagtatgtagttttcaagaaatagtttacataggaggaaatattatggcgggcaacctggtgtcttgtaaggcatgcggcaaagaaatcgctaaaggcgttaaaaaatgcccaaactgcggtaaagatcagagaaacttttttatgagacataaaattatcacattgcttctggcagtagtggttattatcattctcgtaaacatcggcggcggaggcggatcttcatcatctaaaaccgcgtcttcaaaagctgcggaatctaaggaaaaactgtataacatcggtgacactgttaagactgaaaaaacagaagttactgttacgaaagtggaaaaaagagattcagtaggctctcaatttgtcgagaaaaaagcgtctgacggcggcgttatcgtagctgttcaatacacagttaaaaatgtttcaaacaagccgttaagctctttctccattccaagagcgaaattagtagattctaaaggaacatcctatgattcagatattgatgcttcttcaagctatgcaacagaaacaaaagtagacaacagtaaaattttaagtgacttgaacccgaacattaaagttactgacgtaaaagcttttgaagttgataaaaacgcatactctaaaggcacttggaaattaaagttcagcaacgatgttgaagtgaaaattaaataatgaccgtaataaaagagaccttcaccatttgaaggtctctttctttttacaccttttggtacccgttcacattggaggactgccacttccaagagtcggcgcacatttcttcaagcccgcgctttgcttcccatcctaattcagtcttcgcttttgccgggtctgcgaagcatgcggcgatgtctcccgggcgccgggcggcaaaacggtacggcacttcttttcccgatactttttcaaacgccttgaccatctcaagaacgctgtagcctcttcccgtgccgagattataggcatccgcgcctgttgtgttcagcaccttctcaagcgctctgacgtggccctcggcaaggtcaacgacatggatgtaatcccgcacgccggtgccgtcctttgtcggataatcattgccgaacacctgcaattgctcaagcttgccgacagcgacttgggcgacgtacggcattaaattattcgggatgccgttcgggtcttctccgatccgcccgctcgggtgcgcgccgaacggattaaagtagcggagcagcgcaatgctccattcagagtccgctttatgcagatcgcgtaaaatctgttccagcatcagctttgtctgcccgtaaggattggtcgcgcttaatggaaaatcctcagtgatcggcgttgtttccggaacgccgtaaaccgtcgctgaagaactgaagacgatttttttcacaccgtgtgcctgcatggcttcacataaaataaacgtccccgtcagattattatgataataacggagcggaacagccacagactcaccgacggcttttaatcccgcaaaatgaatgacggcttcaatctcattttcagcaaacacccggtgaacggcatcacggtcaaggagatccgctttataaaacacaagctcttttccggtaatgtctttcacacgctccaatgcttccggtgaactatttgacagattatccagaaccacgatgtcatagccgccgtttaacagctcgacacatgtgtggcttccgatataacccgctccgcctgtcactaaaatcgccatgaagaaagcctcccctattgaatgaattgaccatattatatcggttttttcttcctcaatcatccatttccaaaaagtttaatcgtttagtcatcgtttcttcataatttattttcattcgcgtaatacacagagccctcgattcaaaccggttgcgaaatagaaatccctcccccgcgcatggtaagataagacaaaggagatgacggtatgaaaaatgaaatcattgaacgctttacctcttatgtaaaagtcgatacacagtctgacgaaaacaatgaaaactgcccttcaacccccggccagctgacattggccaacatgctggcagatgaattaaagtcgatcggcatgacagaaatcacagtcgatgacaatgggtacgtcatggcgactctgccggcaaatacggataaagacgtgccgactgtcggttttctggctcacgtggacaccgcgaccgattttaccggaaaaaatgtgaatcctcagattattgaaagctacgacggacatgatatcgttttaaatgacaaactcaatgtcgtcctgtcgcctgagcaattcccggagctctcccgctataaaggccagacgctgatcacaacagacggcacgacgctgctcggagccgacaacaaagcgggcattgccgaaatcatgacggcaatggcgtacttgatcaaacatccggacatcaaacacggaacgatccgggtcgcgttcacgcccgatgaagaaatcggcagaggccctcacaaattcgatgtcgcccgcttcaacgcggcattcgcctacacgatagacggaggccccctcggcgaactgcaatatgaaagctttaacgcagccgccgcaaagcttacttgttacggaaaaagcgtccacccgggaacggcgaaaaacaaaatggtcaacgcttcaaaaatcgcgatggaatttcatcacgcgctgccgaaagaagaagcgccggaatatacggaagggtatgaaggcttctatcatttactttccatgaacggagacgtttctgaagccgccctgtcgtacatcatcagagactttgacagagaccgctttgcagaacgaaaagaatatatgcagaaaaccgccgatgcgctggcggccaaatacggcaaggaaagcatcaagcttgaactgcgtgatcaatattacaacatgagagaaaaaatcgaaccggtcaaagagatagtcgatgtcgcatatcaagccatgaaaaacctcgacatcgaaccgattatcgaaccgatccggggcggaaccgacggatcacagctctcttacatggggctgccgacaccgaacattttcacgggcggccaaaacttccacggaaaatatgaatacatttccgtcgatcatatggaaaaggcggtaaacgtcattgttgaaatcgccaggctctttgaagagcgcgcttaaaaccaaagccccctgctttggtttttttctttcacatgaaacctttccttctttctttccgtatataaggtatgaaatggaaagaaggagtgaagactatggcaagagggactgtagcgaaagaattgaaaaataccttaaaagacccgcgtgttctggagacgaaatcaaacccttttaaaaagctgcggaaaatgttcaaacgatttttttaagataacatctcgttttctttaaaaaaataaagaaagcgctgtcatcctgcagtcatctgttagaagcagttattttgcatatgataagattttttagggtactgaataacacagggcaaacgaaaacaacgaagtagttaatttgatgcttacaaaaaatagtgaaaaagttatataaacgattatcattcatcagccgatacaatctatagaaccacaacaagagcaaaatctcttcaacccatagtcatttttacggaaaatgacgttattttttaaaaaagtgacaattgtttgaatacttttcgtttgttttttcgtacaataataataccaaaactttttttgggaggtatgtaaaatgatgctacttatttttgctgctttgacagggtatcttgttttctctttcagtaaggacaaccgccggaaaacgccaaagacaagcccgctggtgacagctgccgacacgaataacatcattgatttaaatgcgatccgtcaaaaacgccggatgccgctatcataaaaaacgacagctgccgcaaaatcggcagcctttttttatgcacccggccgatatgaaaccatccgcctccttttttcgtacaacattaaaaaggagtttttttatgtaccatttttacatcaaagagcgaatgtttacgtttaaaaatcgttttcaagtgtttcttgaaagcggaaaagaagtctacaatgttgaaggaaagctgttttcattcggtgatgaactgaagctgactgatttggacggccgcacgctcgccagcgtcaatcagaaactgatgtcgctcgttccccgttacgagatttccgtcagcggcaaacccatctgtcaagtcatcaagaaagtcacgcttttcaaaccgaaatttgaaatttccggactcggctgggatcttaccggcgatgtgtggggccggaattttcaagtgacagacggaaaatcaaaccggatgactgtcaccaaatcatggatgagctggggcgattcctatcatttgcagattgaaaaggaagaggatatcgttctttgtctcgcgatcgccattgtgatagatatgattctatttgagggtgacaaataaaaatatttatcgaaatatattgacaatatgagaaaacatactaagattaatagtaatacagtttattctgaaaaatagcatatttccttatcaagagaggtggagggactggccctatgatacccggcaaccgctgttcagcagaatggtgctaaatcctgaagataaggttgagatttgcggacgcaagctcttccctatccgagggaagagtttttttatatttcatcaggaaagaaggaatcgttcatgtcacagcaaaacacagaacaaccattgcatacgcttctaagaaaaaacccgccgtttcgcgcggatcaggtcggaagtctgctgcggccggcggctgtgaagcaagcccgcctgcaaagagcggcgggtgagatttcggcagaacagctgcgcgaaatcgaaaacaaagaaatcatccgcagtgtgaaaaagcagaaagaaaccggcctcaatgtcgtgactgacggcgaattccgccgtgcctggtggcattttgattttctcgaaaatttagacggcgtcgaagcgtttacgcctgaaagcggcattcagtttcacaacgtacagacgaaagcgcgcggcattaaagtaacgggagacattgatttttctcagcatccgatgctcgaagattataaattcctgcacagcattgccggcgatgctgttccgaagatgaccatcccaagtccgaatatgctgtttttccgcggaaaattggaaaaagcgtcctaccagaatgattacaaacaatttcagcacgatgtgtcaaaagcgtataaaaaagcgattcaagctttctatgacgccgggtgccgctaccttcagctcgatgacaccgcatgggccgttttcttatcagaagcggggcttcgtcagattgaagctttcggcacgacgccggatgagctgcgcaagctgtttgccgcttccattaatgacgccatcaaggatcgccctgacgatcttaaggttacgatgcatatctgccgcggcaacttccaatccacatggacggctgaaggcggctatgatgcagcggctgaaacgatttttgacgggcttgatcttgacggattgttcctggaatatgatgattcccgctcaggcggcttcgaaccgctccgttatgtcaaacgctctgatcttcagcttgtgcttggtttgattacgtcgaaacacggcgaacttgaagacaaggacgcgattaaacgccggattgaagaagcttcacaatatgtcagcctggaccagctttgcctcagcccgcaatgcggattcgcctccactgaggaaggaaacctgatcacagaagaacagcaatgggcgaaactgcgccatgtcgtcaacattgccggtgaagtctggaaataaaaaaaagacacgcgattagcgtgtcttttccgttttacagcggaccggttccgattaaaatatcgatatctatcgtgacagcagcctctttccggctgataaaccgccggatgctgtcatcagtacatttccatgttaagggcgtcattttcacaagccgctcgaggtcaggctgcgctaaagtctttgtgtaacacagccgtttgcgctcaaaggtttgaaagcccgcttggaatcgtccggccgcagaatcggcggtgtcattccgccgagagctgtctccgaagaagaattcccttacttccttcagataatcacgccgcggcaccgctttaatgactgtgccgccctttcgtaaaagcctgctgcattccttgtaattccaaggtgataaaacagacatcacgacatcaaaacagctgtcggcaaacggcgcatccgccacatcagcgacggcaaaaaccaaatgattcccgaaggcctttgcggcatgcagcacaccttctttcgagagatcaatcccgattcccgtcacggaaaaagcgggctgaagcaatttgcacacggcggctaaatgagagccttctccgcatcccgcatccaatatcgccgctgatgtttgcggagattgaatatgggtgatgatggcggcaatctccttttgaaccggcgcaaaaaattcccggctgtcaaaaagctcgcgtctcgcttcgaacagctgcctgtcatagcgggttttgaccgatttattgaggaaattcacatatccttgttttgatatatcaaatgtatgcccctgtccgcacatcaagcttcggtattgtgagaccgccatggccgaactgcatagcggacacctgaacacggactggcatgattgcagtaattccgcgcgttttctttttatagacgtcaaaaaaacacctcattcattcgttattccgatgaaatgaaaaaggcatagacaaataaacctcacttaattggaagtttcaacctatttatctatacctctcattatctgtaacgaatgaactgaatgatcacgaaaatgcccccttttctgccgtcttttgaaggctgtgccctcagatccattttatcagctgcatcccgtctttacaatgaatcggaacggttttcaggggttttttattcctttattatccaattacttatgcacatcctttattttctttatttataatataaatttattattttgaaaatatctaaaaaggttgattttcaaaaattgaaacgataaaatactgctatctcatgtaatatcgttattcttgtatatgatcagtaatatggtctgattgtttctacctagtgccgtaaaagactagactacaagaaagtttgcataaatttgaacgagtgaaaagcatatgacgctgtctattcttttcttttggctcttatttatcacactttctggctttcaggaatttgtgacgaataagagttttttttatttccataatacccttataggagttgctcacatgtactttttattgaacattgtcggtctcattgttgtcatggctgttgttttcttatgctctcccaacaagaagaagattaaatggcgtccgattgtcatgctcctcgtctttgagtttctgattacttggtttatgttagggacaaaagtcggcggctttgtcatcgggaagatcggcgcgttctttacatggctgatttcctgcgccagtcaagggatcgcgttcgcttttccgtctgtcatggccaatccgacggttgattttttcttcagcgcattgctgccgattatcttcgtcgtgaccttctttgatatgctgtcgtatttcggtattctgccgtggctcattgataaaatcggctggctgatttctaaaatatcccgtctgccgaagctggagagctttttctccatccagatgatgtttttaggaaatacggaagctttagccgtcatccgccagcagcttgccgccgtcagcaacaatcggcttttgacattcgggctgatgagcatgagcagcatcagcggctcgatcatcggatcatacttgacgatggttccgtccacttatgtgtttacagccatcccgctgaattgcttaaacgcgcttttaatcgccaatatgctgaatcccgtggacgtttctaaagaggatgatattatttacgttccttcaaaagcggagaaaaaagacttcttctccacgatttctaacagtatgcttgtcggcatgaacatggtcattgtcattttagcgatggtaatcggctatgtggcgttaacggccgcgttaaacggcgtactcgggctgttcatgcacgggttgaccattcaaaagattttctcatacatcttcagtccgtttgccttccttctcgggttaggtgtacatgacgcgatgtatgtcgcacagctgatgggcatcaagctcgcgacgaatgaatttgtggcaatggccgatctgaaagggcagctgaattcacttccgccgcacacgattgccgtggctacgacattcctgacatcattcgcaaacttcagcaccatcggtatgatctacggatcttatcaatctctgcttgatggtgagaaatcagccatcatcggaaaaaacgtctggaagctgcttgtcagcggaattgccgtttccttattgagcgcggcgattgtcggattgtttgtctggtaaaagaaaaaaagcgataccgctccgttttggagtgatatcgcttttttttattgatagacggatgcaggtacgaaaacgtcccggattcctgccgcgtacggcccgagatcatattgtccgaacacaacggcaatgccgtttttcgtaaagaagaaaggtctttcgttattcaggatgatctcttgttttttgacgtcctgatcgaacagatcgtcatgtttcttgatgtagccgtaaagatagtctctcgttttgttagctttcgtttttgtattcagcacattatcgagtgtgacccgtttttttgcggccaagtcgtaattaaaagtctgaacggatgtcagcccgtgtgcgccgcctgtgtaactgtagtcttccgtctgaatgctgagcttgccgtcttgattatacttcaccttgaaatctgtttggtattccgctttgtagccttgttttttaccgtcttttttgtttttcacatattcttggtacgattgttcaatatagcgcttgaagtcctgattgattttcttttcaaaagatgcgtttcctgtatttgtgacctcagggtatgtcagctgctttacatgcttatacgtatggcttttgacaacgggctttgcggtttgcgcggcctcggctgaaggcgcgaaacccccgaacggcgcggctgtcagcacggttaagagcacggccgccatcattttgaatgcctttttcatcacaactcctccttttcattaccgttccctttttgaaaacgggttacactctatagacagcgcagatcagtaaattgtttctgggccttctttcacattttctccataaaaaaaagagacatggaaaatccacgcctcttttaccgtgaaggtctttgcgcaatggcttcataaacggcttccgccaaatcggagttgccgaacatctccaaaacaccgataacggtttgatcaggaatcggttctgattcctccttcggcacgacaagctcttcagccgtttttcgcagctcttcgtttaaaggctgtccgggataagccttgctgtaaatggccatcggatcaaggtcatgattgacgcaccattgggcaaacaccaaaatcatcatgttttcgtcacgccggtaatattcttcgagttgtttttgattcatatgtttagctccgctattatctttttttattactttatcatatttatattaagacttcattctttttagtttttaaggtgttggatatgccgaagtaccccataatagactcaactaatgagttattactaggcggagtgatcttaattttctcattatagagttttgcaacttttgtttttatttttttgtccgctaaaaattgaatcaatttttccttgttacttccagattcgtaatttgtcggaatgagtaatgaagctgttccatcaattcttgaaaatttaatgtctgaattaaaactatataatgcaaataacttttgtatatcttcatttgcatttaaatttataatttctttaatagtttcatagaaaatcttggggtctaaacaatcttcgataactgtttgttcataatactgaccttgtttccatggttctaaaagtctaactgattcgatattattactttttaatgtttgtaatcttctcaaatccacttttccataactttcagttgcttttgaaacattggtctttactcgatcagtatcaatcatacaaagaattttaccactcattgcttgtgctgtagttttatcggataaaggataactcaataaaccatataatttaatcacattagaacatccaccaacaggtagaattttaaagtttcccgcatcttttaataattcttcgaggtataatttatctgtacttccttcgcatataatccaattagtatttttcatagatttggagtaactaataatgctagttgctaaatcaaacatactttttaatgctatatcatcaggaaatcttcttctttcatctaaataatcaaaaaaactaaaatctgaaatcgaaacacttccttcgatttctttactcacatgaagtaaatgaccgctatttgtgatggggagagatccataccaatgggtcgttatcatgacttgtctattaaagtctttcgaaagtctttctaacctctcgaactgcggaaaacaattaacaacattcatggacacttctggttcatcaatagccagaattaattctctatccatttctttcacatttgaaagaaatgcatatgcaatgtctattaatgcctttctctgctcaccagaacttagtttttgaacttctctatttttgtacctcaatggtctttttgaaaagtaagcttcaataactttttctcttatatctgttactgttaaatttctcttactatttgcttctgggctgtaattatattgattatcaattgcttttatagaattatttatgtcctccataaatttattaagataatcatttataaagtttaagaaacttttatttttcccttctatttcatacctacttgtcagtaccttatcaatttctaataggatatctttgttcattaaagtttgcatttgtttatcttcaatttttaaaatttcgttagcactttgttccacaggaatataaacataagcatagtattcttttattaatttccttatcctttctattttttttatgtattctttattccctaaaattttttcaaagtagctctcgaaaggagcaagtgttggcttcccattaaatttcacacccgagggaagtatatagtattcttgttcagaatagttagttgttaagtagtcaataaactcgtaaaaattttcaatgtattcccttctagcagctccttttaaccagtcttgtataccgctccagaatttgtcgcttataatatttatatcctctaaagttcttttatttccatctatctcagacctactgtatcgatttgaattaataataaaattttcaaatttacccctttcaataaaaaatacaggggttatataccgatcctctctcctagatcctcttgtcgcattccaatctcgtccattaaagaaaacatcaagagattccaagattccacttttgcctacaccatttgctccaatatagacagcatacttttgctcattgttatttgctataggtgcaaaaattgattttgcatatgacttatatccgttaataaaagttcccacaatcataatacttatcccacctaaatttttattatattccagaatatcacacataaaacaaatattccattctgataaactaaaaaaaagcacccttaacagggtacttttgactattcttatatgtttctgccccaatgccgatgctcagccacggctttcagaaattgttcgcagtttccgtccggaacaaggccggggccgttttcggttccggcggcgagggcgagaagttcttttccttcaccggaggcgccgatcgctttgtaatggctgaaggcttcgttaacgaagtctctggccgatttttgggctttgaggctgtctgtgctttgttttccgcccggaatgaaaacagcgtcgtacaggacggaatccgctgtcaggaaagtggctgacgcttcgagctccttgccgttttctcccttcacggtcccaagcgcggggctgatgatatcggctctgactcccgcctgtttgcatgcatcaagcacttgtttgactttctcatcagaaaacccgtggtcggttaaaaccgcaacctgccttgtcgctgccgtcttcaccgtgttttcctggcttaaggccggggaagtgaacgtttcatcagattcacggtccttcggcggcgggttcacgccgattcctttcgcaacacgctcggcaagcccggcgtcgacgtgactgaagacatccaccacctgctgctgcacatccttgctgttcacttttccgacttcaaaacagaacgcggagatgatatgttctttctcggcgggagacatgctgttccagaacatcttcgcctgagaaaaatagtcattgaagctctcgctgcgctggcggatttttctgccttctactttttcctggtaatgaacgtatccgccttcttcttctgaagccggcgacggatcattgttctgcagggaatttttatgataggcgacggggcccttattaatcgtcatccggtggtagccgtcgtattggttgttatggaacgggcagaccggccggttgatcggaatctcgtgaaaattcggcccgccaagacggatgagctgtgtatccgtataagagaaaagccgtccctgcagaagcggatcattggtgaaatcaatgcccggcacgacatttcccgggtgaaaggcgacctgttccgtttccgcaaagacattgtcctgattgcggtcaagggtcatttttccgatcagcttgacgggaaccaactcctccggccacagcttcgtcggatcaaggatatcgaaatcaaacttaaattcatcttcttcgtcaatcatctgaacaccgagctcatactcgactttgccgccgttttcaatcgtttcccacaggtcgcggcggttgaaatcgggatctttcccggcaattttctgcgcttcatcccatacgagggaatgaacgccgagcacgggcttccagtggaattttacaaagcgcgcttttcctttctcgttgatgaaacggaacgtatgcacgccgaagccctccatcatccgatagcttcgcgggatgccgcggtcagacatcgtccacatgaccatgtgagccgactcagggttattagcgacaaaatcccagaacgtatcatgagccgtcgcagcctgcggcatttcattgtgcggttccggttttatggcgtgaacgagatccgggaatttgatcgcgtcctgaatgaagaacaccggaatattgtttccgacgaggtcatagttcccttcttcagtataaaacttcgtcgcaaatcccctggcgtcacggacggtgtcggctgaccccttggaacccgccactgttgagaaacggacgaaaacaggcgttttgacggacgggtcctgcaaaaatttcgcccgtgtatattccgtcatcggttcgtacacctgaaaatgcccatgaacgccgtacccgcgcgcatgaacgacccgttccggaatccgctcgtggtcaaagtgcgtcattttttcacgaaaatgaaaatcctccatcagcgtggggccgcggacgcccgcttttaaagaatgttcatcctcagacacgcgaagcccctgattggtcgtcatttttttgccgctgttatcagaccggtactgctccagctgttcgtcctttgagtgttcatttactcgtttgttttgatcatcactcatgtcagttcccccttttaaaacgaaacattctacagcacatttacccgcggcgttcttcatataaactgctgatccgctcattaggattttaggtctgtatttacatatgcggtcatacacattttgaaataagccattttcacagaaagaagttgtgaaagcgcttaccaaaatagctgttgaacaggggaggtcatatcgtgcttgccatactcggttttgtgatgatgattgtctttatgtatcttattatgtctaatcggctttccgctcttattgctttgattgtcgttcctgttgtgtttgccctgatcagcggatttggcaaagatctcggcgagatgatgattcaaggcgttacagacctcgctcctaccgggatcatgctgttattcgccatcctgtatttcggcattatgattgactcaggtctgtttgatcccctcattgccaaaattctatcgcttgtcaaaggggatccgttaaaaatcgccatcggcacagcggttctgacaatgaccatttcgctggacggagatgggacaacaacgtatatgattacgattgcggcaatgctgcccctttacaaacggctcggcatgaaccgtttggtgctggcggggatcgcgatgctcggttcgggcgtcatgaatattattccgtggggcgggccgacggcgagggttttggcttccttgaaattggacacgtcggaagtctttacgccgctgattcccgctatgattgccggcgttctctgggtgatcgccgttgcttatctcctcggaaaaaaagaacggaagcggctcggtgtcatttcaattgaacacgcaccgtcctctgatccggatgcagcgccgctgaagcgccccgctctccaatggtttaacctgctgctcactgtcgccctgatggccgcgctgatcaccagcctgcttcccatccctgttctttttatgatcgcgttcgccatcgccttgatgatcaactatccaaatgtcaaagagcagcagaaacggatttcagcgcatgcgggtaatgcgttaaacgttgtctcaatggtgtttgcggcaggcatattcacaggcattctctccggcacaaaaatggtggatgcgatggcgcattctctcgtttccctcatccctgatgccatgggcccgcacctgccgttgatcactgcgattgccagcatgcctttcacctttttcatgtcaaatgacgccttttacttcggtgtgcttcccatcatcgccgaagccgcttccgcttacggaatagacgccgctgaaatcggaagagcctccttgctgggccagccggtgcatctgctcagcccgcttgtgccatccacctatctattggtcggaatggcgggcgtcagctttggcgatcatcaaaaattcaccatcaaatgggccgtggggacaacgattgtgatgacgattgcggcgcttttgattgggattatttcgttttaattaaaaaaggatttccgccagcggaaatccttttctgtacattatttttttgtatagcgcacccagtcataatgagcgtatagcggatttacaccattgtaggaaccgagccagtcatcgacacctatcccattccacaagttcatcatgatctttcccgggtttgtcgggatttggcttgtcgcagtatgttttaattgcccatcgacataccatttaatagagtttggctgccaatcgaacgcatacgtatgataggcattggccgcgtcaaatccgagatccgcaaccttctcatggtttcccgcgccatttgtataatagttaaattgaacctttgtcgtgtcttttcctaaaaattcgatatcaatctcatcccaaggagttccatccgttggacctgtataagtgaagaacgatgaaacgatccccgtgtttttagccggtttcattctgacttcataaagtccatagccataggtttgaacggagcggttctccccgcagtcaaacttgttataagacgggcttgtcagcgccaaacgcatttcacctgatgacgtcattgatacattatttgcacgccacgtgcagttgaacatatctccattggaataaccatttgctttttgccataagccggagttatagctgttaaaaggttcaaaaaacgatccgcctgtttgagctgatgcagtagaagtgatcgcacacaaactcaaaaacaatccagtgacaagaagcagcagcactcgtttcatacgataaaacatgtcggcattcccctttctttgaaaacgatttctttatcgatcatacatgattctgttaaaaggggacatcggtcagaataatgataataatgaatcttaaaaaaacctaaattaccatcagcacaaacagaaatgatcagcgctcattgtaatttaggttttgcctgcttatcagtaacaatcctaacaagatcatatgtgaatgaagaaaaaaatgccaacgctttcattatgcttatttgactaccctttctatgtgaatcgttaaatacagcagctcgtcactggtgagcttgtgttcatacgtcctctcaatgcatgtttggattttcttcgtgcattcatacgcccgatggtacttttctttcactgtctccagcaaaaaatcgtcctggctttccatatgtgtgccgttaaatagacgctgcgcgaaaaactttaagtgggtgacaaaccgataatagtgaagtgattcctcgttaaagtcaatcttaaaatggtattttacgatactcaaaatctcttgcatgacttttgtaatgttgatgatattgggcatctcttcattcagctcggcattgacaatatgcagcgcaataaagcctgcttcatcctccggcagagacacgccagtcttgttttttaccatggccaacgcttgtttgccgattgcaaactcgtctttatacagccgtttcgtttcccacaataaggcgtttttgatatccagccctttcttattgcgctggatcgcaaagttaatatggtcggtcagcgacacatagatgctgtcattgagctttttgccgagctgtaatttcgcatagctgataatctcttcggatacttccatacattcgatcgggatatcatacaaaagggttttgaacttttcggatacatctttgttatcgagcgtgaacactttctcaatgcgggcttcatctaccgggtctcccgttttcttttgaaaagcaatgccccggcccatgataaccaattcctgattgccttctttgagcacactgacaacattattattaatgactttcgcaatcttcaattctgtctccctcccgcctgaccatttacctgctacaccttgattttacatcctttttgaactaggtcaatatctccaggtcaatcagaaaacgccgttcagaaatcattgtccaacgatgaggcagcggcgcatataatgcagagaaccggtttttgggaaggagcgtgtgtgatgaaacggttttcgaaagaagaacgcagctggatgctgtatgattgggccaattcagcttattcggtcattattatgacggcggtattccccttgttttttaaagccgcggcggcggaaaacggtgtcagcgcagctgattccaccgcttatttgggctatacgattgccgccgcgacttttattttggcgatgctcggccccgtcttaggaacgattgccgactacaaaggatgcaagaaacggttttttgccttcttttttctgatcggtgtggcgggcacagccgcgctggctttgattcccggtgaatcttggatgctgttattaatttgttatacaatttccacgatcggctttgccgggtctaatgtgttttatgatgcgtttctcgttgatgtggccgcaaaggagcggatgaatatggtgtccgccagggggtttgggctgggctatatcggcagtacgatcccttttctcctcagcattgccgtgattctttcagctcaagcggaggtgattccgctgtccgcccaggccgccggccgcattgcctttttgattacggcggcatggtgggggctgttttcgatcccgctccttctccgcgtccgccagcgctattatatcgagagggagccgcggcttgtaatcagcagttttaaacggctggccggcacgctgaagcagatcaggaagcaccgggcgctgtttttgtttctgctcgcctatttcttctatatcgacggggtcggcaccatcattacgatgtccacgtcatacggggctgacctcggcatcagcgcggcaaatctgctgattgttttatttgtcactcaggtcgtcgccgcgcctttttcgattttgtacggacggctggccgaacggtttaaaggaaaaacgatgctttatgccggaatcggcgtgtatatgattgtctgcacgtatgcttattttatggattccgcttttgatttctgggttttggctatgcttgtcgccacttcccaaggcggtattcaggcgctgagccgctcttactttgcaaagcttgtccccaaacagaacgccaatgagtttttcggcttttataatatcttcggcaagttcgcttcgattatcggccctcttttgattgccgtcaccgcccagctgaccgggaattcgtcagccgccgtgttcagcctgatcattttgtttgtaatcgggattggcatccttgcgtttgtccccgaggagacggcgtaaaaaaagcctgcgcgcggcaggcttttttttatttcttggctttatggactttcagttttttgcctttgaccgtcgtatttttcatgatgtcaagaacgtgcgggcctttgccgttcagaatttcgacgtacgatgcgttgtccagaatcgtgataatcccgatatcatcggctgaaacgccgtcgattttcgcaatcgttccgacaaaatcgaccgctctgagttttttctttttcccgccgttaaagtacagcttcatgatgtctttgtttaactgttcgcttttgtctgttttgacatcggggcgggcgttcagtttttccgcaaaagccgctttccgttccgctgtttctttctcggacggggcctcccgcttttggatgcggaaaccgatatatgtctcaatgtcattcaggaaccgcgattcagaaggcgtcacaaacgtaacggccagtccgcggtgtccggcgcgccccgttcggccggtgcggtgcacatagctttctttttcaagcgggatatcataattgatgacgaggctgatgttttcaatatcaattcctctggcggcaacatcggtcgcaatgagatagcggaactcgccgcgcttgaactcgttcataacgtcaaagcggtcttcctgcaccatgccgccgtgaattttatcgcaagggtagcccagcctgtccagctcatcggttaactggatgaccctttcttttgtccggcagaatatgatgcagctgtccgggttttcggtgatcaggacatcacgcagcaaagatgttttgtcctcttcttctgttctggtgacaaaatgctcaatgtcttttgtcgtcaggccttccgcttttacttcaatcaattcagggtccttcatatatgtgcggctcagcttctcgacgtcatccggcagcgtcgctgaaaacagcatggtgactctgtttttcggcagatactgaatgatggcttccacctgttcaataaatcccatattcagcatttcatccgcttcgtcaatcaccacatacgccagccgttcgagcggcagcgtccctttttctatatgatcaagcacacgccccggcgttccggcaacgacgtggcttttttgcttcaattcggttttctgtttgtcaaaagaagcttttccgaaaaccgccgtggcttttatccgtttgaaacggccgatattcgtgatatcttctttaatctgcgccgcaagctcgcgggtcggcgttaaaatcagcgcctgcggtttgttttcctcccattccgcaagctcgcagatcggaatgccgaaagctgcggttttgccgctgcccgtctgcgatttgacgacgaggtcttttttttgcagcgcggcggggatgacgcgccgctgcacttcagtcggctcggtgtattgcaagccattcagcgcccgtcggatctcggggctgatcgcatattcattaaactcattcatgactaaactccttctctgtccggctcccctcattatacgcgaaatgccgccgctttaccctgacgttttgccgggccattcgggggactgctttttcttcatgtcaagcacgacccatttggcgcaataaaagctcatgcttccttccccgtcatcgacatagtagcggatcgattcccagccgccgtcgaccgggctgatatccagatggatgtcggtgatgctttcaagatcatccagccgggcagacctcacatcctcaaaccgcagcacggcatcatactgcccatcagtcagcttcagctcaaacaccgggattttatcataatactcgttatacccggtatagaacgtaaactccgtcaattcaaaacaacccggcgaatccggccccagcagaactgctttctcatgtttgtgccattccattttgtgcctccttacttaacaccttcttctctgctgtttcatattgacggcaataaaagcggaacgtttggttctcccactcctccacgagaaaatgctgtccctcatctccgtcagcagcaggatcaattgttacaatgcctgaaccagcagcatgactctccatttcttttatttgaacggaagaaacgtctttgcatatgagcctcaaacaaatgagctgatgttcatactcgaaggaaaacaccaactcaattgcagaaatctctcgttcccggaaaaggcggaattctaaaagctcttgaatcagccacttattctttttcattttctataaattctcctatagaagcggcatacaactcaacatcggcagtctcatgatcccacaaataaacagtctcctccattacaccgtccttctttttcaagcacagcttatctccggttccgttgtcagcaattacgatcatatcgtcgggcatgctctcttctctgcacacactgttttgcctgatcacatcatcccaagttttctgtaagcggctttgttcacggataggaaaaaaaatccattctccgatttccgcagggttctttttatgaagcagccgtttatacgctttcggaaaagacgctctcaagctttgttccgcagctccgaactcttcttctgtcatcctgttattcctcctcccgtaaaagcatgagattcattcacaagcggtcttcacttttgaaataagacaggagcgtttctttctatcgcccttattagcggtgagccaaatatcgtaatggtttgctgccgcggatcccctagcagcccccactgaaactcctggtgaataaagaaaccatagtctccgtttggaataacggggacaagccattcaccgaattcatctttatcaattggcgaatgaggattaaatagataacattcatgctgccagtccagcgcatatataaactcttgctttaaggtacaagattgaagtgcctttagtatctgcagtacgatgagttccactgcattcatggtcagaatgattgggtcgcttgtgtttatttttgtattgatttttgtaaagactaattccgacatgaacgcaccctttcttcatgcgttttcatataaccctgcacccaatcttttaattcttcaatcgtatgcagatacgaatcaggcgaatctttcagatcaaacccgctcaaatacacgagcatctcccaaacgttttcatcctcaacctccggatcatctgcagccacgtactcgcatgcccaatccgacacttcttccctcgccgcttgaccgttcaggatcagattagccttcttcagacattctgctattgtgggttctttcacgtcagaagcctgcctttcttgtttaaaatgctgaccaacagccctcttacccgttcgtgccgcccgatttcccggctgagctccggataatccgttaaagcgtttttcagctgcgcatattgcggatacagctcaaaaaaggatttatataaggctttacgctggcgcgcaggcatttgtttattcgccaaaacaaaatctaagctgccgcagacaagcgcgaaatactcataaaaatcccccgcgcaggcagccccctcaaagtcttcttcgaatctccctgtatctgaaggcagcggaccctctaattcttttttgtataatttcaggttgcggatgacgtcatcatttaaagaatatctgttggatttcatcatctcattttgccgctttccaattactgatatcccgcttataaatccccgaattcgagaccacgtaaatggcattgccagtcagcttcagctgatgcccggaaagctcatcgccatccggatcacagcacgtcacctcttgcatcggcagactgacatcggccggtatgagagacagtgaatgatcatctttgcatacccaaaacccgtcttctgaaatcgcaagctggtcgtaaaccccggaatatgctttatcagaaataatccacactcgtttcacgtcggtttcatcaaacgcagcaatgactgtataagagtaatacagcatgtagatcagtccgtctttttctgcaagtgcatagcagtcatctgccgcgggcgcgtatatttccgaaagctgctgatcaatgtgagttttcttcagccggccatctaatgaatagcacagcacactgtgcccatcaggattttcatcactataagtaccttcatcacttaaaccgatccacaggttttgtttttcatccaaaagactgcatgaaacccctgaaggcagagaaaatgcacattgttctgttccatctgctgaaaataccttcactttatactcatgcgattcaaagtaaatcaacacatacctgtcagccaaactctgttgaaacagcataatatcctcacacagaatttgttcatcgatatgaatcactcgaatatcacctaattcatcgataatcgtaaacgaaagcccgtcattctgatgccgtccgagatacagatgcccgcaattatcaaaatggaagaaacgtccttttattgattcgtcatgtatcttattcatttttattttcatgtcattgccccttgaatttataatgcgcggcgagctttttttgaaattcatccggaacgatctgatccgggaatacaactgatacccagtctaaaacaagattatctaagggcctccatgatcctaacgtttttcccgcaatctcctgatcaatgcctagaatacagatctcaaaatctctctctccgtaaatcgcccaccttaaagttggtgaagcccatacgacgcgggatgcaatattcattatgcagtcatttttactgtgctttggataatcagttaagattgaaagatattcatcttcggttatatttaaaggaatctttaaccagtcaaaatagccgaattccacgtgaaaccgattcatatcatcaggttgttccagaacagccattaagataaattcatcgtgatgatgatgcgccaaacttttgagcatctcccagccttcttcagacaagacccagtggaattcctcgaatagataataatgtttttgttgtttaaatacttgttcgggcaacgttttattttcatgaaataaggaatatatttgggattgaaaaatcgccaatttctttgtgttctttataaaaaagggatgcatcttgtacctcttttcgacggtttacacacaagctcacagccgtattctgtgccacacagacgcacttgtttcattaaaaaatgcctcttgttttccccaagcttgtccattaacttttctcttatcactgagcacttccttagaagttattttcagggtgcacagaactatcaaaactttaccaaatataaatcgttatcatgaaagataaacatgcggtcctggacggctctgtacattgtttctctttttctatcaataccgtgtatcatgacgtcagcctctgataagcctttgttctcttcatgaaatgcaaataggttatcctcgtgactctgaatcagaagcaccctttttttcgaaacggacagctgatcacaataggagtattgatcgccgtccagcacatattctgcaacagtacgaattctgtcacgttcaatctgataatgcccgatgacacagcaatcctctccctcgaaacaagcatacaaatcggattggatcgattgtacggcatagcattcatgcatcatttctttaaaatcgtcttcaaaataaaacgttctgtcttctgtatgaaaagcaaatatcgctttcccttgagggtttctctcatcatacataccctcgtccgttaatccgatccataataatccatcctcacccagatgaaatacattggcgcttaatagaaaagaacaaatcggattgattttattactgtttacgcagtatacggctaattgacacgtatgattttccaggtaaacgatcacgatagtgtcatcatacgaatcaaccagatagaaatgggcatcttcagaaaatccgtgtaactcttttttgattaaaagagagctgcctttcataacctccaatattactttgtgatcatgcaccgacacaataaatacttgatcatcccgacccgcattgaaataaatgatattttccctttcatatgacccaacacgctccgcggtaagttttaacatcagcaacactccgttgaataggaacctgaaattttatattaaattaatcaatgatatataaatctgctgcatcgtattcaaaccaaatgattttttcattactttcagtagttacatcaaccttttgagtgttcaggttcatgtaggacttatttttggcaggatttgctattataacaacaaaatcattgatcgatgctaaaaaatataattcatctaataagtaatctgccatcagttgttctttggttaggacacattcaatatgaattaactttttcgatacagtattcatatttatcattttcttttcaaccttcctcttccattcttcaataaaagaaggtgttccataacttctatcagaacggttccaaactctaagtcattcattaattgagaaaaagtatctttactcactagatcacatgaatatatcgagttgtattgaagcggattaatcacatccagattccctatagccctcaatgattctttttgtaaatttaaaggagtgttcatgtttacctccgcgaacgatttcgttatgtaagaaaagagaggctgggaacctctcttatttatgatttcgaatgatacgcataaaatgattgatcatcaaagcgaactgtttcagcttctacagcaatcagcattctgttcatgccaatgagaaaattagcatttgattgatactccggaattacagcatttgatagattaccgattccttccgggtggtaactcatctcaaatacttgccaattgtattcttccggatctattttttctaatctcatatcaccaatatctgcactaaaataaacagatgctgcattttgaaaaagaatgttatgcgtaaattcggctttattttcaacgacctgaatcttaagtgaaagctcttttttaaacacatgaaagtcacaatgaaggacagcgcaccctccgtctatataatctacccattcattaattgtcttgtacaccgtttatctccctaatgaagttttggagtctttgagatctgattttaaagtcttcacgaaaatttctagcttttcttcattacagttcaatttatagaaggttgtatttgaattattttccataaatctaatgataaatctgtaatgttcgttttctttatcaatacttagtataaaaaatggttcaattgtttctaaacgtatcctgtcttgattgcctgctgataatgcttcaatatctgatatcagcattttatattcactttctaataaaacggcagagtaatcgcgaacgattgctttattatgttccaacagttcaaacattgttgagataaaaggatcatcctctgcttcttgataccttctcggtgttatttcaagttccagacaaccgtctccgattttggccatgctgtctcctcgttctctacttaatagctttaatttattagtaaatgatttgaatgacgctctggaattcaagctaagtttcaatcgattgttcaccttttactgtctcagttctaatcacctacccacttattatctataatttttttaaaaaaagcctgttgaccaaaagatgatcaacaggctcatctattttttatttaatgcccttatttaataatgtttgtaatattttctctatgtctagatcctattctgattgtctcggaatctgttatttctatatgataaagaacataatccagtaaatctttaataattgttttctctgctaaagaagctccatttaatatatcttttaactcaacatctttttccaataagattatattttcatgcgcaattattgtatttttgtactcttctgctgaggtttttataaatgagatttttttattaaacaaagtatttgtttttaagctcgctgagaatatacaagtatcactatctttatttgaaacagagtaagaatacattgcatattgtttattttccatattttttaatataacaaatattaaatcctctattgttttatactctttttcaaccgaatcatagtcattgagagttgatatttcataaaaatagtacatttaattctctccttctatcttttatacactgtaaacggcatgagatagaataagtttcttcgtcgtattgatagcctgttagcggtagcgcttgtcttttacttcgtctcagcagtatgttattcccacatgttccgtgtgtagtttggtttttatcatataagataagagaggctggtaacctctctaaatctcttctctaaaaataactaaaagaagctataaatcattcttttaatttttttattatatctgtagcttctaaaaacaattgatttatcttaccttggatttcttttgctatttcctcttcactttctaaatctgttaaatatcccgctttccccgaaaacaaccttctttcacaaacccatatatctaaatggtctacacaatagccgtcttcattatcgtgaaagtcggtgccgttcaaataagctacagaaaaaaatatcagtgaattataggtattctcaaaacaatctgagggctgtacttcttttcctatttctttttcgtttccgactcttccaaaagcagcttcaattttcaaacccatttttctaaacttttcttgattgtttcttattttgtttaatgcaatccgttcaaattgtttttctatttgtaagatctctttttgtgtaatagatttcaggttgattttcttcatattacacctcgttcagaactcaaaacatttactactgtcagtatctgtacaagcgaatgtgagaaatcagtcttttacaattcagtcttcatgatttcttccattgacattccttcaaaatatttatagagaatagattctacagccgaatgtccaaatatacctaatgggttagggatgtctttgcccgttttctcatctgcctctgctaattcatcttctgatgcaaatgaatcgccttcacttatgagatatttaccgtcttcatataaaacaaattttaattgagaatgactgtttttctctattatctcttgaggcatcttggatattactttccaatctccttgcagaaaacctgtgtgcccagtattagccgcaaatattttcttattttcttctttcattagacgaatgatttcttctctgctaagtgtattttcagtgaaaatattataatactgaataagaatgtcatcgtctttattttttgatagatcaccttcaataacccaagcataagtatacttcccgatcttatccaaaggtatttgaataacagctcccggtattactttagctattgatttcgctttcctggtcgttgcctttatttctactattcgcttatcaactaactccgtgaaagaagaatttccatttgtattcataacggtaactaaagttgctaagaattcttctaatatcggttctctatccagctctctcttatataattcacaaaatttttctacagcatcaaaacatatatctaagccttcatcactaagtaaaactttcttgtttttatattcttcttcccaatatcccaatagaacggccttctttcttttctatttcataccgctcattccctgaataatatcgtgtctgaattctgtacgcccagaggttaaaaaggtttccttcatcaactactcaatatcgtaatcctcccactccctccagttattatttacatcacctacatcaactgaacctgcgcctttttcaagatattgcgcaaatgattgaaaagaaattaattggcttggatctgttaggtaatcaggatattcccaatcctctgtttcgaatactccttctgcttcgctttttagatccagtatatttaatagtttttttggctttatccaaagcgcctctctaaaagaagcatcctcaaacaaattcctgaaataagttttccaagccctttcttttgtactcttttggaattcatttctttggtgaatatttacgcaataacgagactctttaatttcaatttccactacttcgcttaattgttgaaaatcactttcactatatgttattttctcacctgcttcagtctttagggcgaagtcatcaattattatcgatttgtagttgtctgaaaaacagttactataggtatgaatagccagaaaaggtcctttagaatctacttcgaagcaatgaattgccagtaaccaattgtcatcatttaatcttaataaggtacatttactcccaacataattagattcacgccattcaaaaattggtcggtttaattcactaaattcatcatctaataggctaagaatttctttacttttaatcaaaattcattctccttattaaattatttttatattttatcttccacataataatttatttaatatataacggattatttccaattactgcatgtctataatatcttcaaaagtattgaacagaatctgtgtgtgcccattttggccactctgtgttaccatcatcatgtttttgaatatatgctatctcttgacgggaaattgcttcggcaattgattgaaagaaaggagacaaactaggcaaatctttttctccttctggatgcatccataattctgttgaatacaattgttcatactccgaagagagacccgctatttccagttgttcttgtttcgtcagccaaagtgtgtcaagaaataatctatttttggtcatatgcctcaaacatgtaatccattcattctttggggaaatcttatcttttatttcctgctcaataaaaaattgaaatgttttctctctaagagacacattgatttgtttacttgtaaaacccgattctatatcttccaattccagcaaatttcctttttcatctgcaaataaaaacggttcatcatctaaaaaacttacttcattatttgttaattgattacccaccgcataaaaatcaatagctggtcccaatctcgacaatccaaacagctggaacgttaaaagccagttatctctttcaataaaaatcgaaagcttcccttttgcgaagtcaaaattctcattatcaagaaacggaaactcttccttattgaatgaatcgttaagcaatgcgagaatggcttctttttttccacccaacatcctcacctccgttgatgtctttttctcagaatagcactagtatatcctccttgttttcgtgaacaagtttgacaatgaggatatagcctttgtcgctggcctttcttccttaattttgatactggttggtgatccgcaatccaatttctgcttttagttccagggtgccttctaccacaagtatgacagccatatttattcccaattttgtttaatactcttctttcctttttatttaacctgctacttgtacttcttgcaggaattgaccttctagcgtatttaccaggttttaaatacttcttggcggccttcgcaaatcccaaagccttcttagcgcctttaaacactttcccaggcccaaagttcgaagccgctgcccaggctgcacctctccatcctttacctgatttataggccttatatccatcataggctgcaaatccggcatttactacaagccacacccaatgcccatccggatcgacgttcatgactgggttgttgtttccgtatgcatatccattctgatctaaagaatcgccgtcacttcccgggtctgggtctagtgataagaatacaccgtttcttggttcgtagtagcgggccatgagatagtacaagccggtttcttcgtcgtattggtagcctgcgtagcggtagcggttgtcttttacttcgtctcttgcttcggtttttgtcggatttccccacgcatcgtactgatatttggcaacggtttttccggtgctgtctgtgatggcgatgacgtcgccgtgtgcgttgtagtgatagaaatatttcttgccgttctttgtataggataacagctggccgctgtcaccgtacgtgtatgattttgtgacgttgttgtctgcgtctgtttcatacaggacattcaagctgtctccgtcgtagaagtagtttgtgacgtttccgttgacggttttttggattctgtttcctttttcatcgtatttgtatgttgcgaacggcttgtcttcgccttttttcgttacggctgtcaggttgtcttccgcgtcccacgtatatgtgaatttgccgtcggatgtgcggttgccgtttttatcataggacaggtcttcgtcattcaccttcgtcagctgattcatgatgttgaaggatgcgttgactgatttgcttgcgccgtcctttgtggtagtaacatttgtccggttgccgaagccgtcgtacgtatattgaatgacggtgccgtcttcatgagtttctttgacgagctggttgagcttgccgtattcgtactgcacctttccgcccgctgagctgtcgatgaccgtgcggttgccgttggcgtcgtattcatagctttcccggaagatgctgccgccgtttttcgctccgatatgaagagagctgacaagattccgctcatcatatgagaagctcgtgccgacttcatttccgctgatgaatgtctggacattgccgttttcatcataatcaaatgtataggctgaagtgccgtctttcatttcaatcatttgatcaagtttgttgtacgtaaagctgtttgttcctttttggccgccgtggctccatgagaaagttttcagcttatccgaatcagccggatacgtccagctttggctgccgccgcggtcggttaattcggtcaggcggtttttgttgtcaaaggtgcgttttttcgttgtattttgttctttgttcgtgaccgacgtttcattgccgtttttgtcataggtaaagttgtatttttcagtgccgttatacgcttttgacttaacccggtcggtgccgtcataggtcagcgacacttcattgccgttggcggaaacggttttcgtcaagttactgttggcgtcatattcactcttcagtacattgccgagcgggtcggttgttttgacgagcttgcccatgacgtcatattcatattgataggtctgatccgcgccggtccgaatcgtttttgtcagctcatttccttccttgtcatagctgtgaaggatggatgtgccgtttgacaaggtcagctttgtcagctggtcggcctgatcgtattcgtaggcggttgtttcgcctttcgcgtcggtttcagacattttctttccagtctcgtcatatgaagcagtgcttgcataccctagttcgtcttcttcttttgtgacgtagtttcctttttcgtcataggtgtttttcgtcaggatgcttccttcgattaaacggatatcatcaaaccacgccgttcctgtggcgcttttttggaacagaatgctgagttcgattttattgatcggctttgttttcggaatgactgccgccgcccggttccattcctgtgtcccctgcgggaatttggcggtgtatacgcccgtcgtgccgtccgcataagtgacgtcagcctgaagagcgtaatcattgtcgttcgttaattttacgccgtcagccttggacatccctgtcagcgtgatatataccggcttatcgtccgcgctttggcctagcgtaacggtttgttttgcggccgcattggcttgtgatgcatttgtgcgggacgcttttaatgagctgtcatcatcgaagccttcatcaaggtcagcggcggctccgcttgtgctccagccatctgttttggccgtgaaactgctgttttgcaccgggttatagcttgaagagacttcgcctttttccagctgaacctgatcaaaccacgcttttcctttgccgtccttgtcgttatgatccacttccatatagacgatggcttttcctgcattggccggtgttgtaaaggtgatctgccgtttcgtccagtcattctttccggctaatgcgcctgattcattgtgaatccattgaatgcgtttttggtctttgtcacgcagatcaatgttgaaatacgctcttgcctttgtcagatccgttttgatctggccgctgagtgtatacgtcgtattcggctcaagctgcacttcctgcgttgcggacgcatggccgtgctctgttccggcagtagaggattgtgaggtgatctccaatgctttttgtccggacagcgcgccgcttcttcctttgacagacgcgatgcttccgctgtctctcgtagcggtgagattccagcccagctttgttccttcaaagctgccgtctttcagcagacttgccgaagctgccagctctttgcttgattgaatgagatttccgtacttgtcatacacggcggctgatgaggattttccgctttgatccgtttcagaaacggcatcaagtccgtcgtacgcaatatcagtgatgttcccctcggtatccttcattttcgttacgtcattgtttttgttgtactgatacgtttcggtgccgtagttgtcttttacggctgtgacgttgccgtctttatcatattgatagctttctgtcgctttgcccgcatccgcgtcgttcgggtcggtgtcctgaatgacgttgttgccttcgtatacagtgttggtcgtgattttcagcccttcggcatcatcgatcatctggatcgggttgcccgcctcgttatagccgtactgcactttgcggccgttcggctgcgtcatgagcagcgtttttttgtccgcgtcatagctgtagtcgtacgtttcttttttcgcattgacggctttggccagacggtggccgctgtattggtattcagtgaacagcggtttatcatccgtgctgtttgcggaatactgcttgacgaggcgcccttcggcatcatagtcgtagcttgtgacgctgccgtcagtatccgtcacctttttaagaaggtctttgtcatatgaatatgaaatctttttgtttttcggccctgttaaagatgtgacatggccgttttcatcataggtaaatgtcagcttgcgccctgatgcgtctgttatggcggtcagctgattgctgtcgttatattcgtatacggttgtgttgttgtgtccgtcaacgattttttggagcttgccgccttttttgctgaaataagcgttcgtctgatcttttgtttttaatacaaattgatcgcttgtttccgtaagttcgagataaacgcccgtcggcggctgatacgtgccgtcagattttttcgtgaagacatgtgttgtcgcgtcctcatcaatataaacggctctgccgtcttcagaaaggatcgacgtttccgcatcggcataccagccttggccgaacatatggtcagagctgtcaaggctgttgaaggtccgggagagtccgagccccggtccgcgtccgtcgattgacatatcttcctcattgacgatgacatttcccgtcgcgccgttcagctgtccgtccggaatgtcgataatagaccagaattcttccgttccgaggaattccgccccttcatggaaaacagggttaaaaggtgccgtcggtatgctgtcaccgtttgcgtcataggcggtcagcgtgaaggaatagttcttcttccctttgtaattgccgtttgcgttttcgtaaacaggtgaagggtcaagcgccagttcgccgccctttccgtccgtgtgaagctggaatcttcccgctttcacttcatcggctgaaggccagatgtgtttgttttgggtcgtccaatgatcggtatccccgacatcgaatgattgatagtcttttccgttgtagatgttgattttgtagcctttggcgtttttgactttatcccatatgagattgacataacccgtttggctcgatttcgtgttcgtatagacatagcctgtcaggtttttcggctttgcgatatcaggcagcgccggactcgcttccggtgaggcgatcgcttctccgtctttgttataagcaatgactttaaatccgtaggttttccggttcgcatctccgccggcgtttttataaacggagcccgggttgatcggcaattccgcgccttttttgtctttcaggtgaagcgcatattttccggcgctgatttccgcctttgtcggccagatgttttgatcttttgtggaccaggatgttttatttccgaggtcaagcgtttcaaagcctttgccgttaaagacttgcattttatacccggctgcgcctgatacggctttccaggaaagatcaaaccagcctgtggcgttgttgttattaaagcctttcgtgcttggtttctgaactcttccgatattcggaatgacgggcttggcggccgcagacatggcgccctctccctggtcaaacaccgcgctgaccgcgacccagtaatttttacttgccggatagctgccgccggcgtttttatagaccggcgaaggattaagcgctaattcagttccgccttttccgtctgtatgcagcttatatttgccggagtcgatttccgcttttgtcggccagatgttttttccttttgtgctccaagaggttgcattgccgaccggaatggcctggtattctttcccgttatagagccagactttatagcttttggcgccttcagcttttttccagctgatattgaaaaatcctgtcgaatctccgttatgatacgctttgacagacggcgtgtccgccttcggaattgtgtatgtcacttcaatgtatggttttttagcagagtttgctgatgacatcagcttcttccaatattcttttccgttgccgtttgcgtgaagcttaaagccgtaattggcgccgccgctgttccacgacttgactgcggaggtgacatcgaagcttgcccattggcctttatagacctcggctttgccgatgtttttggagcccggcttgttcttccacgtaatcttggcattgtcgtaattgctgttaacggtgtcgagccaaagccccgtcgcttttgatccgtaataggagtgggctgtgtacgctttgagcgtcgctttcgtcaccgtcatgtttttgatcggctttagattatcaaacttcataaaagcgtagttcgttccggttgtgccatcataatatccagttttcagcacgtacgctttcaatccggcatcccatttctgcgatgcggcagagtagtttgtcgtcgggtacgcgctcatgacaaaggtatcggatgacacagatactgatgttgaagggtcaatagataccggataaacccgcttgggatctttcagccatttttcatcggccgttacatggagcaagtagccttcactgtttttttcaagcttgaagctgacatcttctgacctgctgacttcacctgacttttcgtcgagatctgagtcggtcataaagggcttcggcacggtgtagacgacattgtctttatcatcagaaaacgcgatcgagccgtcttcctgttctttagcctgaaggtcggttttgatttgaaaggtgaaggaattgtagccttcatatttgtgaagcacaaggtcttcttttatgttttcgttaaatgtgtaggtttgtaaatcaattgcaggaaacacttgctgatacgtaagctcgttgctgtcttcccttacttttgctgaggcatctgtcggagtgattgcagcctgatcggggccttttgcgccggttaatgagtatgtgagcttatgatcatcatgttcaaatgtagcgtataatccgtttttcatttgcttcagaaaatcggaattcagcactgtattttccgttccgacttcctttgagccggttttcaattcaggagaaacgtcttcccagtccgcattggcggtttctttcgtatgtatggggtctgtgtagatttcctgtttgtacacaccctcgccttcatagtaaagctttgaattctcagttctttctgacgtgatctcaccgtcttgattgatatctttttgatcaaaaggcatctgctcagatgctttttccgccggaagatctttttccgggtctgcggccggaatggcggcggttttcgcttgatcttgtttttcacgcgtttctgccgcaaacacatcggcaggcgcaatggaaatcatcagcgttgccgcaagagtgccggccagccattttttccacttgttcttttttcctattttcataggttctcctccttcttttgtaatataggcttaacaatagtaatattattgaaattgtttatcaatattttcctaggtatttaaggttattttaaggattatagggattttgaaccttttatcatataaaaaaaccgccggctgccggcggtttttcgtattatggatagcggagatttgtattttgcgctcccgcgtaagattgggcgaagtttttggcgtcctgggctgaaagggttccatagctgtaatttgatctcggattccagccggtgcgcggtgatttcggggctttgagcgacgggaatgaaccgatgtcggtgaattgggccgtcccgtagtcgtctatcattccgcctttttcatttccgttaccgaaatagttggcttctgagaaaacagtcgcgtttgtatgaatggtgaatcctaaattgaaattggtcacatagttgtttttcgcgtgaaaatagccgtatctcatcaggcccggtgaacgcacatagacgttattaaaatagttgttggtgatcgtcatatgcggatagccgatataattgcgtccttcgttatcatcattcggataaccgagaatcaggccgtacagatggtctgtgaatttagagttagacagcgtcacaaaatccgctttggcgccgacatacagaagctttcccaaatcactgtggctgttcggattgtagctgtgtccttcaaaccagacgtggtcaatccagtaattctgtccgttcgctatgtacatcggaatgtcgttgttgcctgtaatggcggcactatggctgataatgagatttttgaaaatcacattgtttgagccggagccggtggtcagatagatgttggtcagcctgtggctggtataagagccgacgatggttttattggcgccgactgtcacgacggctttacccggggaagaaatatcacttgtgatgacgatggttttgcggtccgttccgcccgcattgtttttcagatcattaagattgctgacgtagacgacggggccgccctggcctcccgatacggcggattttgcttttccgttatgatccttcgcatttcccgcgaatccggtaagtccctgcatcacatccggataagccgctgccgcttctgcctgttttgatacggaacatacgatggccagacaaagcgcaaatccgagtgcagccaagaaagcgagatgacgcgtcttttttatcatgcccttcactcctttaatttcttaaattgtaaacacaagaagtattatacaattactatcctctttttccatgatctgtttgtctgctttttcgttatggctgaaaagccccaaaataaaaaagcagccggtatggccgcctatatacgggtgctgtctgcctgagtttccgccggcacggctttttgctttcgaatcagagacagcgccattcccgcaaaaatcaatacaatccccaaagattgataaaggtcggggcgaaatcccgtaaatacggtgtcaagcacaatcgccaccgccggatcaagaaatacgatgattgaaataaaccgggtggataaaaaccgcaagctgtcaaaaaagagcaaatacacaattcccgtatgaatgataccggtcgacacaatcatgatccagttcacatgcgacaaatcagaaaaagcgccgaaacggacgaacgggagaaggatgataacgcccaacccggtctgcaaacaggtgacggcgtatgggctgaggctgttgatgcctttcccggccagtgtcgtaaaagcataaaaaagggcggccagcatggcccaaataatacccgatcccatcagctgagaaaatgatgtactcccgttaatgccggaaatcagggcggtgcccagaaaacaaatcacgatagaagtgacggacacaatatgcagtttctcccggtatataaggctccctaggagaaggacgagaaccggagccagatgataaacggaaatcgctatcgtcactgatgtctcctcaaacgatttaaataaaaacacccagtttaacacgagaaaaaatccgcaggccagtgtctgcagcaattcacgccggttccattgttcggtgcggtatcgtccggaaccaaaccagcaaacgcccagaaacaatgaggcgcacagacatctcacaaagaccagttcaattgaaggcacattcgtatgttctgagaaaaagccgattgatccgaaaatgaccatggaaatgaccattttgatgacggcatttgatgtttgttcagcttgcattgatttgcttcccccatatcattgactgtttattcagacaaatactaacagccattttacttgattcagaggaagatttcatcctatttttcgaaagacggcggtcttttctcataaaaaaaccccgcatcagcagggtcttctgtttaatgaacgatcagtacaggacaaggagacaattgtgagaccttatggctcacgcttccgagcatcatttctttaaatccgctgattccgcggcttccgacgacaatcagattgaaatgctgttctttcgctatgtttaaaatttgatgcgcaggttcaccttggacgtacaggctttccgcatttaccccgctttcagccgctttctgcttggcctcctccagaatggccgctcctttttgctcgacttcatgtttgatgtcttcaatgaagttttccggaacatagacaatccctgttaaggctgatgtggagacaacggcttcacgtcccgcatagagaatggtgagttcagcctgctgttctatcgccagatggatcgctgcgtccaaagctttgctgctcatgtctgaaccgtctactgctgcaagaatttttttaaacatatgaatcccgcctttctgcttttattgtcctcctctctttactgaatgtcaattttgtcggctttctccggaacattacgcttacagactttctccgtttgtggcgatgacgtttttataccaatccaaactacctcagcgttattttttaagcgcttaataaataggactttattctcttcttttttagtattacctattggtaaaagtagtgataaaatggaattattgatataaaaaaggagattatgatgagaaatcatagaggcttccatgaggaaattcagcaacaacaaaaactttatccaacatcacatcgcattcaaccggtcagcccaaaagaatatgcagaggttttgactttacatacggcaaaacaactgagcgagacatttcaaacacttgtggatcaagatcaatatgaacaagcgattcagctgagcgagaaggttgcctctcagcttggaaaacatacgaatttttcattgccactttccacagtgctttatagtttaaatgaaatggaacttcctatttcagaggaattttctctacatcgtctgaaactgctaggaaatcatcaaactcatgagaactttttcaaagcattaaaacacgaaatgttaacggcggatcgggtagactttatggttagtttcacaaggtggtctggtgttcagcttttgatccctccgcttcaggagcttgctaaaagacatgtccctgtacgcatcattacatctacctatatgggtattacagaaacgaaggcgttaagacatcttcttcaatttgaaaatgttgagttgaaaattgtaaatgaatataaaaaatctttccatacgaaagcatacttatttgaacgctgttctggacagcatagtgtcattgtaggatcttcaaatctatcacaagctgcacttatgaccgggtatgagttaaatgttagactacctgaaaccagatatctccccgtttatcaacaaacaaaagatttgtttgacactgtttggaatgaaaagacacagcctgttgacgaacaatttttacaagcctatgaggaattccaaacaggaagccaaaaggtaagtgcttcctttgctgctcaaaactctctttacaaaacgaaaatgtccccgaatgccatgcaaaaggaagcgttacgaaaccttaaaaaaacaagaaacgaaggggagacaaaagcagtcatcatcgccgccactggaaccggaaaaacatttttagcagcatttgattttgagcaatttaaaccaaataaatatctttttcttgcccaccgggaagagttacttacaaaagcaatcgaaacattccagaaagtcaccaataatcatgaagattttggtttattgactggaacgaaaaaagaaagagataagcgttttttatttagcactgtacaaacgctacataaaaaagaaacaatggaatccttttcaacagatgaatttgactacattgtgattgatgaattccaccatgcagaagcatctacctatcaagctgtattaaactactttacaccaaagtttttattaggtttaactgcaacaccagagcgtcttgacggtaaagatgtgcttcagatttgtgatcataatgttgtttatgaaattagactccgcgatgccctaaaggcagagctacttgcaccatttcactattttggaatttcagatcatactgtagattacgaaaaagtaaaagtgaaaaatggactgtacgaagagaaatcgctagtagatcatttaaaaactcataaacgagtagaatatatcattaagatgatcaacatgtatggattccacggcgagaaaatggttggcttaggtttctgtacaaacgtcgaacacgcaatatacatgagtgatgaatttaataaattgggattttatacaacttacttaacaggaaatgattctcctgcaaaaagacaagaggtcattcgtcatttggaggacccgcaccacagtttagaacttatatttacagtagatattttcaacgaaggaatagatattccaaaactcaatctactattgttccttagaccaacagaatcaccaacgattttcattcagcaattaggacgggggcttagaaaaacagacgacaaagagtttgtaacgatactggattttatcggaaactatcaaaagtcatttgttattccactcgcactatctggacaaacaagccaaaaatcgtttgataaagattccctccgagtggccgtgacgcatgagttttcagatttacctggaggatcttatgttgacctttcagccgtaacgaagaaagaaattttaaataagatcgatcatattaaactaaattcagatgccatgctgaaaacgttatacaagcaatttaaacaagagctaggacgctctccagaattaattgattttctatactctgaacaggcacctgggcttaccttttttataaagaaatacaaatcgtgggtacagaccaaaaagaaaatggacgatttgaatgttacagatgaagcaattctcaataaccccttggttgtagggatagtagcaaaattagaacagcaattacctattaaatggccttatgaatggttaattttacagagcggttttcacaaaaatatcatcacaatagaagatgtaaaagaatcgttagaaaaacagtttcatattcaaatcacaacagatacacatgatgacctcattcagcgagcaatggagcgtttaacgaaatcagatcaaaaacagaattggcgctttggtacattacaaggtgatacattcaagttagatccagaagtgagcgagatattaaacgatccattattcggaccgtatattaaggagcgcgtccactatggactgattgaatttagacgtatgaacaatatagaagcccttgcttcaaaagagattaagcttacaatgtatcaaacctatacaagaaatgaactcatttatctttttcagtcaactaatcaggaagggacttggcgagagggtgtacgtagagttaaaaatcactatttaatctttatcaatttgaataagtcagaaaaagtagaagatcatttgctatataaagattattttattgatcctagccattttcactggcaaagtcaaaaccaaacctcacatacatcaagcatagggcaaaactttattcaccataaggaaaaaggataccatattcatttatttgtgaggaaattcactgaaatgcacaacatcactttaccatttatttatgtaggagaagcggattacgtatcaagccacggagacaagccaatgaatgtcaaatggaagctccatcagcctgtcccagaaaacttgtatgtggatttaacgaattaaggcagatacggtcggaagatcagcgggtgcccactctagtgattctagctcacgtataggcacccatctgaattccgcatgctcttttgctaccggcttccctgatacaatcttcgcttttattgaaattaaattgacgatgaccttctcatattcatgatgaatatcggctattacatcgcccgcaacaattttacagtcaagttcctcttcaatttctcttacaagtgcttctcgtgcattctccccttcttcaagctttccaccaggaaactcccacagattaggcagagacattgttggagaacgtagagcacatagaatttcattgttttcattttgtatgactgcggcggctacttttattgtttctttcaaaattaaacttcctttcgttttttcttaggtatgtattcaaatttttcaattttatactgttcactgtaaacgatagaggttgaatccatcataattcaaatggtttattaaaagcaatagaaggtcattctcctaattagcaagaaaaaagcaccctccaaaatggagtaggtgctaatttacttcactccccaaacagcctccccatcaccgctcagcacactaaacgtcacaacttctttctctctcgctgagtcccattctttcaggaagacgccgtcataatttgtgccgttcaggttgattcgggctttgctgctgtccgttattgaccaggttccggtcatttccccggaaatggtgccgtcgttgttaagccggatgttttttggggttttgatcgtagctgtgatgtcttttccgtgctggatgagtttgtaggttccggatgcggcggccggcggaatgtgtgtatccggttctcccgcatagcggtatggcgctgcaacgggccatccatctttgttcatgtacagccgatgcactctgacttcatgctcttctcctctgttcgggaaacgggtgtggaaaatgaggtatgatcgtttcgttttcccgtcgtaaaacacggagttgtgtcccggcgatacgtagcccgtgcctttttcagattgtgaggcgaagctatagccgcccatgagtttaaccccgtacggttcaattgctttgtcgtcgaagaaactgccgtcttttcctttggcatcaagcatgttatgacctgcggcgtcatagtacggaccgtccggatatttagagcgcgccacacgcatattgtaaccgccggctgtgtcaagtccgccgaatgacagatacagatagtaatatttcgtttccggattgtagctgatgtacgggccttcgattctgctgtgatttccgccgagcagtttttttccgtagccttggttcgggagcgggaaaccggttttcgggttcatttccagtataaaaatccctccggagtaagagccgtacaccatccagagcttgcctttatggtcaaaaaacgtttgcggatctacgacgttcgggtgaacgtttgcatgatacgtcgtgccgtcttcgctttttccttccatgcctgatttcaaaaagatgcctttgtttttgtagggtccttcgattttgtcactcacggcgacaccgagagcggatcgcggcgagtctcctttacaggcgttatagtacatgtaatatttcccgtcagccagctgggcgacgtccggcgcccacagcgtatcagactgggcccagtcgaatgtctcttttaattcggtgtagacattcgggatcaggggattattgggattgacgcttgaagatatctgctgccactgcatcaggtttttcgacttggcggaagccaaatgcgagccgaatacataatatgtatctcctgttttgatgacggacggatcatgcacgctgacctctgaaaaaaccggatgctgggcttttgcctgcggcagagtgaacccgatgaccgctgctgagaccaggcacacacgaaagaaactggttttcattttctgaaatctcctcgctctcttcttttcttaaaacgctttcaagacaacgctccattttatgatgcggatggcggaaatatgtgatcaacagcgccggcttcacgatgtaccgctttacttcgatagcaatctgatttgtgaaagactggaaaaaaagttttgacttctgattcgcaaacacttaatataaaaaacagttactagttatcagaatatttaagaattgagtgaagcatatatgaccttacacaaagaccgccgcatcgggcgactgtccgtccttcttctgcttcatgagactgaagaaaaccagcagatcagccggctggaacgggacggctggaaagtctgtctcggcagggtgggttcaatggatgcgcataaggtggtagctgcaattgaaaccgcttccaaaaagagcggcgtcattcaatctgagggttatcgcgaatcacatgcgctgtatcatgccacaatggaagctttgcacggagtgacgcggggcgaaatgctgcttggctcgctgcttcgtaccgtgggcctgaagtttgccgtcttgcggggaaatccgtatgaaagcgaggcggaaggcgattggatcgccgtttcactttacggcacgatcggagctccgattaaggggcttgagcacgaaacattcggagtcggtattaatcacatatgaatcagcccatagatttcagatgatagggggctatgcgtgaaacatcattttcatggcatagctcctttttgtatgggcgctttaccaaagtaaaggaaaaggggttgaaatgatggtaacgttagacggttcctcactgacaaccgcagatgcccagcgtgtgctgtttgattttgaagaggttcaggcatctgccgaaagcatggaacgtgtgaaaaaaagcagggcggcggttgaacggatcgttcaggaggagaagaccatttacgggattacaacggggttcggcaagttcagcgatgtgctgattcaaaaagaagacgccgcggatctgcagctgaatctgattctttctcacgcgtgcggcgtcggtgatccgtttccggaatctgtatcgcgggccatgctgcttttgcgagccaatgccttgctgaaaggcttttccggcgtgcggactgagctgattgatcaactgctcgcgtatctcaatcatcgcattcacccggtcatcccgcagcaagggtcactaggggcgagcggagatttggcgccgctttctcatcttgcactggcgcttatcgggcaaggcgaagtcttttacgaaggggcccggatgccgacagctcatgctttagaaaagacaaaccttcagccggccgtcctgacctctaaggaagggctcgcgctgatcaacggaacgcaggccatgaccgcaatggggctgatcgcttacctcgaagccgaaaaactggcctatcaatcggaacggatcgcgagcttaacgatcgaaggccttcagggtattatcgatgcgtttgacgaggacattcacgccgcccgcggttatcaggaacagatggatgtcgcagagcgaatccgctattacttgtcagacagcaagctgacgaccgtccaaggggagctgcgtgtccaggacgcctattcgatccgctgtattcctcaagtccacggcgcatcatggcagacattagcgtatgtaaaagaaaaattagaaattgagatgaatgccgcgacagataacccgctcatttttgaagacggcgccaaaatcatctcaggcggaaactttcacggacagccgatcgcctttgccatggattttctcaaagtggcggcggccgagcttgcgaatatttctgaacgccggatcgaacggcttgtgaatccgcagctgaatgacctgccgccctttctgagccctcagcccggcttacaatccggagcgatgatcatgcaatatgcggcggcctccctcgtgtcagaaaataaaaccctggcccatcccgccagtgtcgattccattccttcatcggcaaaccaggaggatcacgtcagcatgggaaccatcgcctcaaggcacgcctaccagatcattgcgaatacgagacgggtgcttgccattgaagccatttgcgcgctgcaggccgtggagtaccggggtgcggaacattgcgcctcgtacacaaaacagctctatcacgaaatgagaaacatcgtgccgtccatacaagaagaccgcgtgttttcttatgacatcgagcatctgagtgactggctgaagaaggagtcttttctgccgaatgagcatcaccaaaaactgatgaccaatgaagggggacttacaagatgactgatgtaaagaaatcaatccgcgccggccgcggcaccgaacttgaatgcttaggatgggagcaggaagccgtgctccgcatgctccgaaacaaccttgacccggaggttgccgaaaagccggaggatctgatcgtatacggcggcataggcaaggccgcacgaaactgggatgcttttcacgcgattgagcgttccctcaaaatgttaaaagatgatgaaacactgctgatccaatccggaaaaccggtcggattgttccgcacgcacagccgcgcgccccgcgtcctgctggctaattcggttctcgtgccgaaatgggcggattgggagcatttccatgaccttgagaaaaaagggctgatgatgtacgggcagatgacggccggcagctggatttatatcggctcacaaggtattttgcagggcacctatgaaacctttgcggagcttgcgagacagcatttcggcggcagtctgaaaggaacccttacgctgacggccggacttggcggaatgggaggcgcccagccgctgtccgtcacgatgaatgatggcgtcgtcatcgccgttgaagcggatgaaacacggattgataaacgcattgaaacaaactattgcgaccgtaaaaccgcatcaattgacgaagcgctgcgctgggccgaagcagccagacaatccggagagcctttatcgatcggccttctcggcaatgcggctgaggtgcatcatgagcttttgaaccgcggcgtccatattgacatcgtgaccgatcagacttcagctcacgacccgctgatcggctacattccggcaggatactcacttgaagaggctgaccgcctgcgccgggatcagcctgaattatacgtaaggctttccaagcagagtatgaaaaagcatgtggaagccatgctcgccttcaagaaaaaaggtgccgtcgtctttgattacggcaacaatatccgccaggctgccaaagatgagggtctcgccgatgcttttgattttccaggattcgttcccgcctacatccggcctttattttgtgaaggaaaagggccgttccgctgggccgcgttatcgggagaccctgaagatatataccgcacggacgctttattaaaagagctgtttcccgaaaatcaagcccttcaccgctggattgacatggcacagaaaaaagtcacattccaaggcctgccgtcccgtatttgctggctcggctacggtgaacgggaaaagatggggctcgccatcaatgaattggtcagaaacggcgagctgaaagccccgatcgtcatcggaagagaccatttagactgcggatctgtcgcctctccgaatcgggaaacagaagcgatgaaagacggcagcgacgcggtcggcgattgggcggtgctgaacgcgctgatcaacacggcctcaggcgcaagctgggtttcttttcaccacggcgggggcgtcggcatggggtattcccttcacgcgggaatggtcgcggtcgctgacggcagcatccttgcggaacaacggctttcccgcgttctgacaagcgatccgggaatgggcatcatccgccatgcggacgcaggttatgaaaaagcggctcaagtcgccgaggaacaagacattatgataccgatgaaaaaggagcggtaacatgccgaaacaaatagataccatactcaccaacatcggccagctgctgacgatggaatccggcggcccccgatcaggcggaagcatgcaggatcttcgtgtcacggaagatgccgtcatcggcattcacgacgggcgcattgtttttgccggacatcaaggagcggaggaaggatacgaggcaagagacatcatcgactgcgggggacggctcgtcacccccggcctcgtcgatccccatacccatcttgtattcggagggtcccgggaaaaagaactgaatttaaaaattcagggcatgtcctatttggatattctggcgcaaggcggcggtattttgtcaacggtcaaagacacgaaagccgcttccgaagaagaactgattgaaaaagcgctttttcacctcggacgcatgctgtcatacggcatcacgaccgcggaagtaaaaagcgggtacggactcgacaaagacacggagctgaaacagctgaccgcggccaaaaaactgggcgaacgccagccggtcgaccttgtcacaacttttatgggggcacacgccattccgcctgagtaccggaacagccctgacgaatttctgaatcgcatgctgcagcttttgcctgacataaaagaaaaaggcctcgcgcaatttgccgatattttcacagaaacaggcgtttttacggtcagccagtcacggaactacctgaaaaaggcgtctgaagctggtttcggcctgaaaatccatgctgatgagattgacccgctcggcggcgcggaattggcggcagaactgcatgctgtttctgccgatcatttggtgggggcgtctgacgaaggcatcgaaaagctagcggcgtccggaacgatcgccgtcctgctgccgggcacgactttctatctcggcaaacacacttatgcgagagcccgggagatgattgatgcgggcgtacgggtcagtttggcgactgacttcaacccgggcagctcaccgacggaaaatctccagctcattatgtcgattgccgcgcttcatttaaaaatgaccgcggaagaaatctggcacgctgtcaccgttaatgccgcgtatgcgatcggaaaaggcgaagaggccggacaaattaaagccggacgggcggctgacattgtcatttgggaagcgccgaattacatgtatatcccgtatcattacggcgtcaatcatgtccgccgtgtcatcaagaacggaaagacggttgtctcaagggagggagccgctcttggataagtatccgtttctgcaaaaagccggctccctcttcaacgaccgccatgtgacaaggatcggcgatgtgacggaagcgtgggcgggacaaacgatcaaagggccggctttgatcggcgttccgctttctaagtcgtcaatcagccattccggcgcctgctttgcacccggtgcgatccgccgggcgctcggcgggatttccgcttattccgcggagctgcgggagcatgtcattgaccatctgtacgatatcggcgatattcagattcacgtcacggatgtcgtcacatctcacgaacacatttatcggaccattcatgacattctgacggaccagcctgactgggtgcccgtcattctcggcggcgacaactccattagttattccaccattaaagccattgcggaaacgaaaggaacaacagccgtctttcaattcgacgcccaccacgacgtccgcaacacagaagacggaggaccgacaaacggcacgccattccgccggctgttagatgaaaatatcataagcggacaaaacctgattcagcttggaatcagggagttcagcaacagcttggcatatgaacaatatgtaaaagagcggcaggcagacgtgcatacaatggagatgatccgggagaaagggctcctccgaacgatacaagatgtcttgccggccgttcaaaaaagagccgacgccatctttatttcggttgatatggatgtgctggatcaagctcatgcgcccggctgccccgcgatcggccccggaggcctgtataccgaagaactgcttcaggcggtccggtttttagccagtgaggctgacatctcgggtattgagatcgttgaggttgatccgacacttgattttcgcgatatgacaagccgggcagccgcacacgtcattttacatgcattaaagggatttaaattgtcacgttaaagtcaaatccggcacgcgtgctctcggctgccggaagattctcgcgccacgcaaaaagggggagatcacgatggatgttgatcaaggcggcaatcaactcaagcgcacgatgaaaagcaggcacttatttatgatttcattgggaggggtcatcggcacggggctgtttttgagcacagggtatacattgagccaggccgggccgggcgggacgatcgccgcttacctgatcgggggcttgatgatgtatcttgtcatgcagtgtctcggagaattgtcagtagccatgcctgtgaccggttcatttcaaacgtatgcgacaacgtttatcgggccgtccacgggttttatggtcggtatcatgtattgggtgaattgggtggtgacggtaggatcggagtttacagcttccggtatcctcatgcagcgctggtttccccacagcagcgtctggatgtggagcgcgattttcgcggctctcctttttgccgccaatgcattctccgttaaattgtttgcagaaacagagttttggttttccagcgtcaaaatcgtcaccatccttttatttatcatcttaggcggcgccgcgatgttcggtttgatttcattgcacggttcgggtgaagctccgatgctgtcgaatttcacctcacacggcggactgtttccgaacggctttcttgcggttttcatcgcaatgatttccgtaagcttcgccttttcagggacggagctgatcggaattaccgcgggtgaaaccgccaatccggcaaaagatattccgcgttcgatccggaatgtcgcctggagaacggtcatcttttttatcggcgccatttttgtgctgtccggactgatctcctggaaggaagccggtgtgattgaaagtccgtttgtcgcggtcttttcccaaatcggtatcccatacgccgccgatatcatgaacttcgtgattttaacggctttgctttcggtcgccaactccggactgtatgcttccacccggatgctgtggtctcttgcgaatgaaaacatgatcagcgcccggttcaaaaaagtcacgccgaaaggcattccgctgaatgctctgctcgccagcatggccgtttcctgcatatccttgatctcaagcatcgccgccccgggcacggtctacgtggtgcttgtggcaatagccggatttgccggtgtcgtggtgtggatgagcatcgctctgtctcagctgttatttcgaaaacattatgtgaaaaacggcggacgcgtctcggatctgaccttccgcacaccgttataccctctcgttccgatcgccgctgtgatcttatgtttcgcttcatgcgtaggccttgcatttgatcccaatcaaagaatcgccctcttctgcggaattccttgtatgatcctgtgctatctcattcgttttttgagaaagaaacagccgaaacaatccgtccgtgacattcatttggataaaaccatgccataaaaaaaggcacatactgatgaggtatgtgcctttcttctcttattccgtaatcagcgtatgaatcagtttcggcgcttccgctttttctgagatgcggatgttgtcatagactttggcggtcacgtcgtcaacgttttcgcggttggcgtaaagggtgacgagcggctcgcctttttcgacgttgtcaccgacttttttgcggagcataatgccgacggcaagatcgatttcgtcctcttttgtcgcacgtcccgcgcccaacagcatcgctgcgacgccgatttcgtcagcgacgatttctgaaacgacacccgcttcttttgccggaacgtcaattttgtacgccgcctgcggaagtttggacggatcgtcaacaacggaagcgtctcctccctgattgctcaggaactctttgaacttttcaagcgctttgccgtttttcatgacttcctgcagcttcgttctcgcttcttccaatgtctcagcttttttcgccaatacgaccatttggctgccgagcgtgaggacgagttcgtttaagtcttcaggcccttcccctcttaatgtatcaatggcttcttgtacttccagggcattcccgatcgcaaaaccgagcggctgcgacatgtcagaaatcacggccatcgtctggcggccgacgttgtttccgatgcggaccattgctttggcgaggttcacggcgtcttcatccgttttcataaacgcgccggcgcccgttttgacgtcaagcacgatggcatctgctccggcggcgatttttttactcataattgagcttgcgatcagcgggatggagttcaccgtacccgttacatcacgcagcgcatacagctttttatcggcaggcgtcaaattgccgctttgtccgatgacggctaccttgtcgcggttcacaagcttgatgaattcatcttttgacaattccacgtggaagccttcgatcgcttccagcttatcaatggttccccccgtatggccgagaccgcggccggacattttagcaacgggaacgccgagcgccgcgacgagcggtgcgagtacgagagttgtcgtgtcgccgaccccgcccgtagagtgcttgtcgaccttaatgccttcaatggcggagagatcaatcgtttcccctgaattcaccatcgccattgtcagatcggcgcgctcctgatccgtcatatcctgaaagtaaatcgccatagccagcgcgcttgcctgataatcagggatgcttccgtccgtgtatccttttacgaaaaattgaatttcttctgttgtcagttcttttccattttgtttttttacaataagatctaccattctcatgatctatcacctgtccttcatttatgttcagtgaatcaatccgacgatcgccgctgtcaggaagctgacgagcgttgcgccgtacagcagcttcagcccgaaccgcgcgacgacgtttccttgtttttcatgcagccctttcaccgcaccggtaatgatcccgatagaggagaaattcgcgaatgagacaaggaatacagataccactgcctgtgtatgcgcactgaaatggaaatcgccggatgagagtgtctgcatcgccacaaattcattcgataccattttcgtcgccataatgcttccggcgctcaccgcttcattccacggaataccggttaaaaacgcaaacggcgcgaatacatatccgagcagcgcctggaatgtaatgccgaagaccgcattaaaaacgccgttgaccagagcaatgagtgcgacaaatccgatcagcatcgccgctacgacaacggcgactctgaatccatccattatatactcaccgagcacttcaaaaaaggattgcttttcttcttcaggaacgacgatcaaatcctcttctttactgacggtgtacgggttgatgatagaagcgatgataaatccgccgaataagttcagcacaagcgccgtcacgacgtattcaggcttcagcatcatcatgtaagaaccgacgatcgacattgagaccgtcgacattgcggacgcgcaaagcgtgtataagcgctgttcagtaagataaccgagctgttttttcaaactgataaagacttctgattgccctaaaatcgcggatgcgacagcgttataagattcgattttccccattccgttcaccttgcttaacgcaagcccgatatacttcgtgatgaaggggaggaccttccaatgctgcagaattccgattaaagcagatataaaaacgatcggcagaagcacgctcatgaagaacgtcgtctgtttcgcattcacaagcccgccgaatacaaagttaatcccttctgatgcatattccagcaagtagttaaatccttttgcaaaaccgccgacaagaaaattcccgataccggtgttgaggagaatataaccgagaatcagctgcagcacgagcatgacggcgatcggccggattctgattctttttttgccgttgctggcaagccaggcaagacctaaaaacacaatgattccgataattccgatgagatacttcatatgtgttctccttttatttgtattcgcttacaattttttatgcatcaacaaagaaagaggatggcggaagctttcggcttccgcactgctgattaatagtcgctgctgccgctgtctccgccgctcacgatagagacgcccgcacttgcgccgatccggctcgcgcccgcagcgatcatgctgtcaacatcagcttttgttctgatgccgcctgatgctttgaccccgatgtccggtccgactgtttttctcatgagagcgatatcttcagccgttgccccgcctgtagaaaaaccggtagacgttttgacgaaatctgcgcctgcggataccgccaagcggcacgcgcgctctttttcttcatctgttaaaaggcatgtttcgatgatcactttgacgagcgcttttttatcagctgcttcaactaccgcgcggatatcagcttcaaccgcttcatcatcgccgtcttttaatgcgccgatattgatgaccatgtcaacctcagttgccccttttgagatggcatccttcgtttcaaatgcttttgtttccgatgtcgttgcgccgagaggaaatccgataacggtgcaaacgtcaactcccgtgcctttcagttcctccgctgcgagtttgacccaagtcgggtttacacaaacggaagcgaatttatattcttttgcttcttttatcagttgtaaaatatccgctttttgtgtatgcggtttcaaagcagtatggtctatttgacttgcaattgacattgtatgcacttcctttttcctaggatacgtttagaataaccgaattttgaacatatgtaaattggtaattgaaattatgttcatgaattgtcacaattcttgaatgagttttttggccgtatgctgatcggtaatcaaaacgttggcgtactttcctttcagggcaccgtgaatggccttgcattttctgctgccgcccgccaccagaatcgaacgctctttcattttcaagtcgctgagctcgactccgatcgtcctgccattaatgctgctgctgcaaatcctgccttcctcgtcaaaaaagcgcgaacaaatatcgccgactccgcgtgctttcagcaattgtttctcttcttcccggaaatagccgagtctgaaaagcagcgcctcatcccggacggttccgaccgtaaacagggcgatattggcttgtctgcccatttcaatgatccgcttaatatgtctgtcccgctcgaccatctgtttcacatcggcgctgtcaaatataaccggcagcggcaaatacctcggcatcgtctgaaatgcttcggcgaacagctgaatcgtttctgacgagtacgtattaacattggaatgactgatgccgcctttcagctgcacgacttcaacgctctttacctgcttcggctccatgcggcttgcgatctggtacatcgtcgtcccccagcttacgccgagtatatcgccgtcctttacggttttatgcatatagtctgcgccatagcggcttaagtaatgtgtaatggcctggtaatcgtcgcttggagaaaagacgacgtgcgcctcaagcagcccgtatttttcttccagcttcgcgccgagttcgtccagatcctcaaacgggtccatgacgcgaatttgcacataccctttttcctttgcgtactgaagcagccttgaaacggtggggcgtgacagatcaagccgttcggcgatctgctgctggctgtaatctgattgataatatagttttgccgcttctatgctgagctgctgtttttcacgatccatgtcgcgcctcccctctccgcttatcatatcaccaaaacacgcggtaaaaaagcaccctctgatggggtgcctattttttcagcacaagctcctgaatcgcatgcgccacgccgtgttcgttatttgatttcgtttcataatcagcaatctcccttacttccgggatggcattggccattgccacaccgcagccggcccactgaatcatggacatgtcgttgccgttatcgccgattgccatgacgtctttctgttcaatgccgagtttttcggccagcagcttgactgcgtttcctttactgactttcgggtgaagaatctcatggaagaatggcgcgcttttgaccattgtgtatgtttccttgaatgattccggaatggaagcgatcgctttctccagcttgtccggattgtcaatgaacatgactttcggaatcagaatatccttcggcacttcatcgatcgtgcggaaatgaagcggcactttcgtaatgtatgattcgtataccgtgtattcactgatatcccggttcggcgtgtacagattggctgtgtcaaagtaatgcatcggagtatccagctgtaagctcagctcgtaaagcgacttcaaatcctcataacctaatgactgctcggccacgacaccgtttgtatacgtattttggacgagtgcgccgttataggcaatcacaaagtcgccttcctcctgtaagttcagctcttccaaataccgacgcacgccgccgatcggccggcccgtgcacaggacgatattgaccccttccgctttggcggcatcaagcgccccgcggacttcagccgtcacttcatgatgatcgtttagtagtgttccgtccatatctattgcgattaacttgtacatcctgcatctcctttgtatccttttcttcttatgctttcatcatatcgttttttcgtttcaatgaaaaatcaaacggacaagtttctccgccttctcttcgtataccgggtctgcctccggatgcggggccgtcttttccccttgtcagcttgttcgccgccgtcatctgttttctgcttcaagagcatcagccccgccgcaaagaaagggacggccgctatgtccagaagggcaagctttattcccatcgctgcgggaaagtatgcccataatgaacggctgttccgcctgatcatgatataagaaacgatttccagcaggataaacagagcgttcacccacaagtaaatgagtagcgccgcaaacagaaacagcaggagcgtattccgcagcgtgccggaaaacagaagagcgcgcatcatatcaaagaatgaaaaagactgcatgctgccgttgacgacattgggattgtaaatggtaaaacgcccgaactgatcaaaaagcataaaaaataaccataacagtgaaaaccattgaatgatatgtacgatgacacccgtcaaaacgagtctgtcggcagccttatttctcatgtgcatcctccccgccggtttttattcttgtcattgtttttgtttctccgtatatcttccaaatgagcgtatcgttttttcctcttttcaacgtgcttttgacggggtgcggatggccgaggtattcaatctcgatcgtcccgtccgtattttgtgagatcaccttgtacacatctgagggcatggcaacctcgccgcggccttgaatgacctgctttgtcagcacgctgtctttcgtaaacgtgacggtttcagatctgaccccgtccatcgggcccggcttcagccctgcatcccatgtcccgtaataaaaaggggtatcgtctgctttcttttgcgagcagcctgttatcatgacgcatccgaaaacaagaaccgtcatgatgaaaatccgtatgttccgcaacatgatcaccttcctttgaagcttttttacgcctgtaacttaggcggatgccgtggcactgtgcaattgactacatagtgtataaagacttcactagataaggagaatgatgaatgaacccatatcagtactacaccccgcctgcctatttccctcagcagcaggaatacgaagtgaaccgcgttgagtatgagccgtatcagcagcaggaaagctattattatgcgccccctcagtccgaagagcggcagccgacaggtttagaacggagagtcgcccagcttgaaagacaaaacgccgagcaaacgagagagctcacccgcctctcacaagaagaccagcgccaaaaccgggaaatcacgcgtatgaatgagcagatcagacggctgagccagtccattgaaatccatacccgccgcttaaaccgtttgaatcagcgcctgcgcgcagtcgaaaacagactcaatattccttttcacgctacagaaggcggcttctgagaaaaagggccggaatacaaagctcgacaggccatcccgagccttgtattccgctctgtacataacaggtaaatatttgaatccttttcttgcatgaatgcctctcctattctttcacatgataaatgtgtaaaatcaatcactccaggaggttttcatgatgtatcaaaaccaatacagcggaaatcagctgcagcaatgccgccaaacagcacagcagcttattcagcagacacagcaaagcagtcagcagtacaagcaaatgctccagcaggaacagcaaaacattcaaatgcttcagcagatgcttaaccatgaacagcatgccgttcataccattcagcaagcgctgcaggggcatgaagcggccattcaaaaatgccagcaaatcgtgaatgtgtgcaatcagcttcagcaggaagtaagcggacacatgcctgcaccgatggcaaacgctaatgtttcttcattcccgcaaacacagcatcacacaccgtttcagcagcattcataccagcaataggccggtcatgcaaatgacaaagcgcgagataccggctttgtcatttgtttttatctctgttttgtcagatcaatgcgatgagcgggttttccgccgaattttgcttccgcctcatgccttaccgcttcaaacgctcttgcttcgacgttttgtttaaacacatcaagctgtatcaaataagccgcccgcactttcagcccgtggatgatggagatgacccataaaggcagcacgatatacacgcccggcgtgctcggcagcacaaaagcaattgctaaaataataaaatagataagtccgtatttcagccattttttgttcttggcccggtagccgatatagaaaaaggccaagaaagcggtcagcgcaaacggcgcaaaagtcagcagcagccaccagctgtgcagcacttcccaccaagtccctcttttcgtaatcaacattcattcctcctcctttactactataacatggataatcaaggaaggttttctataaaaaacatagacggaatgacgtcttcctgctatattaataatgataatcattatcactgaaatagggggatcattatgaagaagcaatcatggctgatcggcctggcacttctgcttgttttcgcattaagcgcttgcagcggcgcgaaggaaaacaacggatcggcatcaggcaaaggaaagacagacatgcgtacatatgaatcaacaaaagggaatattgacatacccgcacatccgaagcggatcgtcactgacttttatgcaggtgagctgctgtccgttgacgcaaatgtcgtgggggcgggctcatggactttcaaaaatccgtttatcaaaaaacagctgaaaaacattactgacatcggcaatcccgtcaatgtggagaaagtgatgcagctgaagcctgatttaatcgtgctgatgaaggaagaccaatacgagaaactatcgaaaatcgcaccgacgattgtcattccttttaacaccgcaaagaatacgaaagatacggtcagcctattcggcgacattgccggggcgaaggataaagccaaaagctttatggcagacttcaacaaaaaagccgaagcgaatcaaaagcgcctcaaaaacgtgatcggcaaagacgagacagtcggcctttatgaaacgacggataaaggcgaaatctggattttcaatgacaattccggccgcggcggccaagccgtttataacgcgctcggattgaaagcgccggccaaaattgaaaaagacatcatgaaaacgggcgccatgaaacaggtttcccaagaggtcatccctcaatatgcggctgattatatgttcattaccgattacaatccgaatggagaaagcaaaacatttgagcgtctgaaagattcatccgtttggaaaaatctcgatgccgtaaaacacaatcgtgtctttatcaacgatttcaacaccttctatccgtatgacccgattgccgtcagcaaacagatggatatcatcaccgacatgctgatcaaacgggctgaagaaaataaaaaataaaaaaagcggcacagtcatgacactgtgccgttttccctgttcactttaattttgactgtacggagcccggcatatcttcaaatctgatttcttcccaggtctcgacatattttcctttcgccttcactttcaaatacgcgttcttccgaagatctttcccggcgaaaaaggtcacttcttcttttttcccggatgcgttatatccgtctaatgtatactcagtaccgcccgggctaagatgtttgccatctcgatcaatctgtacataaacatcttgctggtgaataaacggattaaatctgtctgtaacatcattatgaaaaaagagaattccgtatatgacggcagcggccgccaagacggccaggattgccaatgcttttttcatctgtgcactccccttacttgttcatttttttcaaatagcttgaccgcactgtgaggaagaacagaagctgaaagatgaaaaaccctccgatggtcagactgagcggccccgctacatcggaatagccttccacggccaatgttctcaaggcaaacagcgtatgcatgacggcaatgacgaaaggaaagaaaaagagaatcgccaattgtatcgtcacgctttgtgccatttcacgctcactcaggccgattttagccagtgaacgatagcgctcccggtcctcatctaaatcagtgaacagcctgaaatataagaaacttgctgccgcgacaaagaatacaattgcgataaacaggccgataaataaactcaggctcggcagctgcaccgtatcatagtacgtcccggcttttgccataaaatcagaatgcacgtcgatatagttgccgtaaatctcatttttcaaggattggctgatcccaagactgtctttccaatgatcatagctgtagccgtataatgacgctttttcaccgagtgatttaagctgatcaaaggtttgatcgttcaccgcgatgatggcatttaatgaaatcagcggtttttcgacttcttttaccgtcagtttttggtcagacggcttgcctttttggttcagcagcttcagctgatccggtgctttgtttttgaaattccggtcatacgtactcggaaaatagacagcctcatcatgtttcaggccgttcagcttgacatggaagtatgttgacacatccgattcgctgatcatgtaaacagggggaacagtatctccttcctgatagcggacataggaaacatttattttgtctttcttatacgtaaagccgtgtgttttcagttcatggtcaatttttttcaaatgagtctgttcttttggattattgctgtaagataaatactccatctcataagcggactcttccgccccgacggtcgatttgtacatcgcgagcacgcccgtcgccgtaaacgctaccgcggaaataatgctgacgataaagaacaggcgggcattgtcttttaaacgataaacaagatcagaaacccaaatgacatttttcccgcgcagataaaaggttttccacttcttcagcgcgcgcagaatccagatgctgctttggctgaaaaagaaatacgtgccgatgacggtaagcagcaaaatgataaacggttgagtcccgtggacattgcctttaaggaccatgccgtacccgccgcacaggcaggcgatgccgaatatagacagaagcacggacggcttcggctccggcttgatcttgtcagtgccctttattaatttgatcaccgtatttgatctgacaaaaaggatcgtgaactgcgataaaaggaaaaataagagcaggaatccgccggccgtaatgccgagcgctttccaaggcatgtacagaggcagcgcctccatttctaaaatataagcgccgaccgtaaagaacgttttcgaaaaaatgaagcctccgataatcccggctgcgatcgacatgacgccgatgatcatgttttccgccgtaatgagctttctcagctgcaccggcgtaatgccctgcatcagcaggatgccgaattctttatttctcgatttcaaaaatgcgttaaccgaatacagaacaaataagaaagaaaaaacaaagatcatccattccgcggcggttaagccttttctggcgatgttattcaggtagccttcctttagtgccggatgaaacaggaacatcgcaaaggtaaagaaaatcaaaacggaaaaagcgctgcttaaaaagaaagcaagataggcccttttgtttctcgtgacgtttttataagcgaactgaagaaaggtcatttgcgtttccccccagcatagacagcacatcaagaatctgctcataaaagacttggcggttttccccgcggtaaatctcattaaacagttcgccgtcttttataaagatgacgcggcggcagtagcttgccgcaaccggatcgtgggtcaccatcaaagccgtgatatgatcatcctgattcaggctctgcatcgtttccatgacgtcttttgacgctttggaatcaaggtttcccgtcggttcatcggccagaatgagtgacggcttatgaatgaccgctcttgcgatggcggcccgctggcgctgtccgccggatacttcaaacgtccgtttgttgagcaggtcttcaattccgagctttgccgcgatgccgtgcagtttttcttccatgacagacggcgcctctttttcaagcgttaacggcagcatgatattttcaccgatcgtcagtgtgtccagaaggttgaaatcctgaaacacaaatccgagctgcttgcggcggaaatgagcgagctttgtccgcttcagccggtgcgggttttctccgtgaatcaggatatcgcctgaatccggccggtcgatcgttgaaatgatattcaaaagcgttgtttttccggagccggacggtcccatcaccgccgtgaacccgccttcttctattgaaaacgaaatttgttttaaagcttgataggacacttgtcctttataggttttatttatatgtttgacttcaagcatattcgccatgaaaatcctccttatggttttattcttgttggtctgggctgctttcatgtagtgccggggcatttaacataaaaatccccttgacataaatccatgttatcaaggggaaacagaacgagctatgttgttttcttaacgcagccttacatttttgtaagaaatgaaaatcggaccgatgtcccttcaccgggggacgagctgatgtccaccgtatgattgagcttgcccgtaatttctttgacgagatgaaggccgattcccgtagattcttggaaacgccgtccgttttcgccggtgtaataagggtcaaacacccgcttgatatcttgcgagggaatgccgacaccgtaatctttgacttcaagcaccgtcctgtcttcatcgcggaagacattcagctcaagtctgtcactcttgcctgccgaatacttgaccgcgtttgtgaccacttggccgatcgcaaatttgagccatttcgcatcggtgtaaatctgatgatcatcgcgaatatccattttcggatagacgcggtattgaataaaaaatcgtttatagctttgaatgaccgattggagaagctctgataaggaaaccgcttcaactttaaaatcccgctcaaacaggtcaagccttgaagaataaagaagcgtctccagcccgaattcaatctgccggacctcttttttgatttgttcaaagacgggctcatcctcttcctgaatgattaaattaatgaccgacagcggcgtttttacttggtgcacccattggttcatatacgtcacccgcgcgtccagcttggcttcggtctcatggagcttctggtgctgcatccgggtcagctccatctgcttttcatacagctctgaacaaaacactgaagaaccgagatacgggatgtccgtcccttcctgctccgagctgagccaatgatacacaccccggtctttgtaccagcgataggcaagatatcccgccaaaataagaagctgcacgcccaatatgtaaaacaggtgggaaaaagaatgaagacccgcaaaccagtaataaaagaagacaaacagcccttgaaggagaaaaagcagaatcagcacggcatgagaccggagaaacagcttcatgacagcgccctcagctggtagccttcgccccgcaccgattcaatggaaacaggcgcattcagctcccgcagtttttttctgagccgcgtgatatacacgttaagcgtattatcatcgacgaaaatgtcggtgtcccacgttttttccatgagccggtctcttcccgtcaccttttctccccgctccagcagcacttccaaaagcttgctttcttttttagaaagctcgcttttttcgtcctgaaagcgcagttcaaaccgttccacaaagagctgcacaccggcatattcaaccactttctctccctgcttggcggcgtacgctccgtatgccctgcggatctggcttttgattttcgccagcacaatatcgtaggaaaacggtttttcgatataatcatctccgccgttttcaatcgccatcacttgatccatttccccgcttctggcagagataaaaatgatcgggcttgtggagtgctggcggatctggcggcaccaataatagccgtcataagacggcagattgatatcaagcagcaccacatcaggcttttcccgcaaaaaaacatcaagaacagccgtgaaatccgcagcggccacggtttgatatccgtatttttcaaggtaattctgcaatagtccgcgaatgtcttcactgtcttccacaatcatgattttattcatgcaaccatcctccaaaaggatacggcttttcggagccctcattatttgatgcccccatcataatgctttcatcggttctctgcaacatgagaaagcgggcctttataaaagacccgcttctccctttctcaatgtaagatcgattatttctaattgacattgttatacttagatggcggactcggaaaggtaattttaaatcttgtgccaattcccggctgactatatatatcaatatttcccccatgtgccttgataatttgttgagcaatagccattcctaatccagtccctgagttatttgacgaagcgcttgtccctctgaaataccgatcaaataaacattcaaccgtctcttcgtccattcctatcccatcgtcttctattataatttgtatttcattgtcatgtaacacgtcctgatataatatgacctttattttagtgcccggaggattatgtttaatacaattagcaatcaagttttcaactgcgcgctttaggtacctttcatccatattaaaaagtatcttattgtgactggattctatagcgaatctcttattttctgactccggtagcaacttcattttttctaaagtgtcatgaattactttcactgcgtttttttcttcaagatggattggaagcgactcatttttcaattgaaaagttaagttgaaatcttcaatcagcttttccatatattcgacacgttcttccattattaaggaaaaatcacgcacttgctgattttcccactcatattcatttgaagataaaagaaccgtatatcccttaataaccgaaagaggggtttttaaatcatgtgagacaccggccatccactcttctcttgttttttccaacaactctctctcagccttattcctttgaagcgttgaggtaagttcagacagagcttgcattaattcttgataggtcttatatccagatttattatgtctatatttgcttgaatgaaacttccgatcataaggttcttcatatttttctttagacaaattctcaatccaagatacaataaacagcaggggagcacctagtttttttccgtaaaatattgcaattacaatccctgccatcataatagaaactatccacaagttattcacccaatagaaaaaagggttatttttttccatcggttttccccatacccatgttaaatcctgattgtttttcgtttcataccacgtagataattgataaccttttttggcaggatacatgtaatctgatattaactctccaagaatataatgcttaggtatatttttaggtttattaaaagaaaaaacctcatctccttgttcatctaaaatttgaatccacattcggttctctaataaatcttcttttgctttcgtatttattgaaaattgtttatctgcaacaactgtttggtcaacaattttttttaaggataagtgcggcgtttccattttattctgacctaagacgaggctgaaaaatatgatactgcccacaatgagcagaccccaaataaacatgagtaaaaaaagtctcgatacgaagtaaaatgctatcctatttctcagcttcaaaataaatcctcatctataggctctgcttcaaatatatagccctgtcctcgaaccgttttaatccatcttggtctgctcgggtcttcctctaatttttcacgtaatcgtcttacatgtaccattacagtactatctccgccataaaactccccccacacatctttataaatttggtgtttacttaaaatttgattgggatgttcgcagaaataaatcagaagtttcatttcctgagcagggcaatcgattcttgtcccgttaacaacaagtctgccggtattgggatctattttaaaatattcataatcgtatacctgttttagagggtaagaagaagagagttgagtcattctctttaattgggcttttacacgagctacaatttctagtggattaaatggtttagtaatatagtcatctcccccaaaactaaacccttgcaatttatctaaatctgttgtttttgccgttaagaagagtatcggcacatttgtatgcgagcgtattttgctgcataaggtgaagccatcagtgtccggaagcatgacatctaataaaataatatttggaagttcctgatcgattttcagaagggtttcgctccctgtcatagctgtggaaatattgctgaaaccttccttttcaaagcaagttattaataagtttaagatatgttcgtcatcatccaccatgaggattttgttctcttctaacgtcataagttaccctcctttttatttcttattttatatgagatcaatgacataaaggtcagaaaaggaaagaatttaactttcgttaagggttcagaatattcttttaaattttcgaccttgatattcaggtatcaatataactacatacagaaaataaaccagggatgtcgttaagtgaatgtttaggaagagtttcgtttgtgtttaaagaacatcgcttatgataaaagtgaggtgagagacaaatgaatgatcaaatagtggtaacacacgatctaactaaaaagtataaaaagcatacttcagttgatggattaaacttaaggattaggcgcggcgaaatttatggttttcttggaccgaatggtgctggtaaaacaacaaccatccgaatgttattaggtttagttaaaccaacaaaaggaaacatcgaaatctttggccaaaacctaaacaagaatcgtttgcagatattgcaaagaatcgggtcactggtagaatctccaacttattatggtaatttaacaggttacgaaaacttagaagctgttaggaggttacgaggacttccggaacaacgggtcaatgaagtattggaaactgtaaggttatctaaagtagcaaatcgactgactaaggagtattcccttggaatgaaacaacgtttgggaattgcagttgccctgttaagcagtcctgatttattaattctggatgaaccgacaaacggtttagatccatccggtatccaagaaataagagagctaattaaagaattgcctaaatcgggaatgagtgttattgtatccagccacttattgagtgaaatagatcaaatggctactcaagtggggattatcaacaatggaaggatgattttccaggactcgattgcaagtttacatcaaaaacgaaaaccactattaaaagtcggtgttagtgacgtaatcgaagcaaaaacaatactaaacaggaaaggattaaaggttgatttacaaaaaaatgatttgtggctgtctcaaacagaaccggaatttgtttcagaaatcaattccatacttattcattcagggctgtctgtatttcgacttgaagaaaagacacgatcgcttgaggatatttttttagaattaactggtacagagggaagtctatgaaaaagttattatgggcagatcaattaaaactgaaacgttcgtcgttattgattgtagtcttattggttcccttactcattatagcatatgagttggtaaatcttacttatcgatctgaatacgtggaaaaacaagctgaaatgttccatgctggatcaatgtggatgtatttactgtatgataacagtttgttatttggtctgggttttccattagccgcaacactttctgcgtcaataatagcaaatatagaacatcaagcaaacggatggaagcaaaccctttcttttcccgtatctagaatgcgaatttatgtaagtaaatttatttgcttagtagtcagtttatttatttcgtcaacaatcttcttgctcggcatggtactgctgggcaaactggtaggattcgaaggtagtgtaccttggggacttttgtttggagatagttacagcatgttagttacagtactgcctataatggcattccagatatggttatctatggtgtttagcaaccaagcattctcaattcttgtaggatcaatatcatctataatgggtttgtttttggcagctgctcaatcaacgagatggtttccgctggcttatcctagtcaatcttcgacagtcattctgcagtatgaaggtataggatataacccagatctttcatcttacctttgcattagccttttcttagggataattatattatttgtaggctctattcattttgctaaacgggatgctttgtaaaaaggaggcgaaatacttgaaaaacattttatttgtagaacgtttaaagcttaagcgatcaaagttatggatcatctatttattagggcctttgttaggtgtatccctggcatacacgaactttattaaaaactataacctttttatgaatcctggagacaatccctgggtagaggcttggacacaagttgccctatttatgggcccttttgtattgcctatcgtagtgggaattttcgccgcccttgtttgcaggggggaacatgtaggaggcggttggaaacagcttctagccttaccagtcaaacactcagatatctttctgggaaaatttctaacagtggtccgcatgatattcattagtatgttcattttaatcctcttatttattggattcggttatatgttaggcataagcgggagtcttcctttacttacaattctaggttatggaattagagggatcttagcttgtttaccattaattttattgcagcttattgtttcaattaggtctaaaacatttggcataccactcgctgttagcattgtttttacattaccggccattattattgccagtacaccattaggtcaagtatatccatggacacagcctatgttagcaatgtcacccgaagatgaatcaccgattcaatcaaacttcctattttactcaattatggtaataacatgtctcggtctcctggtttacggaataagaaattttactaaacgagaccttacgtagggtatatgcggtataaacttatgagaattcgagacaaggtaataatgaaatcactgcgaaagacaaagacatgacttatagattattttaacaaaaaagaaagttaccgacgtcatcgataaagaaaagaataataacgaattctagttttcataactatagtaaacgagggggcaagctgtatacaaatcgcttggattgaaagagcctgtaaagatgaacaggttgatttgattgtgatactttggtgaaacgcgagaaggacataaacggaaagacgaaagcactcacgatgttgtgagtgcttttcatcagccgacctgctgttttacggctttaccggctgatccgaactctctcattttgcttcgcactgtctcttccacggcctcaatgccgggtgtcatgtagccgcgcggttcgtacagatcgccgtttttctgaaacatgcggcgtgtttcttctgtccaggcgaccatacattccgtgttgatattgattttcgcgtggccgagcgtgatggcttttttgatctgttcctgcggaatcccggatgctccgtgaagaacgagaggaatatcagtcatgcgggagatagcctccatttctttaaatccgagattcggttcaccttgatatttgccgtggacggagccgagggcggcggccagcgcgtcgatattggtttctttgacgatccgctcacattcggcgacatcggcatagcggaccccgccgaccagcccgtcttccatgccgccgaccgtgccgacttctgcttctactgagacgccgtgctgagcggcataatcggcgacttcttttgtcatcgcgatgttctcatcaatcggatgatgggagccgtcaatcatcactgagctgaatccggcgtcaatggcctgtctgcagcgttccgcactgcttccgtgatcaagatggagcacgacgggaacggtaatcgccatttcttccattaacgcgccgaccatggcggaaatcgttttaaatccgcctaaatagtcgaccagacgatcggaagccgcggcgatgaccggcgattgctccttttgcgccgcttgcagaatcgccttcgtccattggaggccgttgatattaaattggccgactgcataatgctcccgtttcgcttctgcaagaagatgtttcatggtgacaaaagccatgttcacgcctccttcatgaagtattttgatacgacggcttccgttgtttcctttgccgttttgatcgtttcctccgcagtcagcttataatattcaggtctgaacagctctacggagacaacatcattgaatccgatttcttttaacgctgacagatgggcgtctaagtcaatcgcaccctgtccaggccagacgcggtcttcatctgttaaaaagccgatcggaaagtcttctgtatcgtcgatatgatagatgaaaattttctttccgtccgcctgcttcaagctctcaatattggagcccatcgcgtggaaatggaagctgtcaaacaccagtccgacattatcgcggccgacagcgttcacgatgtcatacgcctgttcaaatgtattgaccgtacattgcgggtggccgacaaattcaagggcaatgtttacgccgtacggctccgcgatgtccgaaagctcagtcagcacctctatgctgctctttttgatctcttctttcaagattttccgctctgtcacaagcggcacggccaccacatatttcacgccgagcgtcctgcaggtttccatcatgcttttgaattccgaaatgatctccctataccccttctcatcacggttgttgaagaaaaccagtgcgttcagggcaagcggtttaatgtgatgggttcgaaaatattccgccagatcggccagtgaatggtcttttaagtattccggcagcttatccattgtgcggatttcaatataatcatagccgtgcttttcgcacagttctaaatcctgtttcaggtttgaattctccagcgtagtcgcttcattaaagcaaagtttcatgtcagcctctcccatccgcgttttcgatatgaagggagtccggcaggagggcttgtttgccccgctccgccgaactccatactcagcttatgccatgcctaattcttcctttaatttcttaagcgtggtccggcttgattcatccgctctttcaccgacccaagcaaaaacagcgttcgtcgcaattccgtcgaatttcatctctctcatctttctgaaaatcgtctcaaaatcaacctcgccttgcccgatgtccaaatgttggtgaaccgttactttcgcgtcaggcgggttgacgatgtagcgcaggccatgcgccgctttatgattaaaagtatctgcaaataaaacatgtgtgaggcggtcgccggcttcatcaaacatggtcgcaatatcgccttttccgtcatcatagaagaacgtatgcgcagtcgagtagacaagattgatccaatccttgtcaagcgcgcggatcatatccatcgcacctttgtgcgtttcgataaaatcgtatggatgagcctgcagattgagtttaacgccttctttttcaaagacgggcagcagttcatccatggatttgatgaatttttcttcacttgtcaaaggatcatattttgaaccgctgaattcactgttcatcaaatccacttcaagttcaaccgcaatttcgatcgcccgtttccagttgcgcacggcggcctgacgacggtcttcatcaggacccgcccagtggtaaagcggaagaagagaggacagcttcacacctgtatcctttaaaaggcgcttcaattgtttgatttttgctgaatcgactttcggatatttgtagaaaggacaaaaatcctcgcgcggggacagttcgatatattcgtatccgagctccgccgttttatagaccatttcttctaacgttaaatcatcgcggtacatggatggatctaaggccagtttcatttctttcactcccgatctattatttgttcacagtcgtaaatgattggtagaatgccggtttctcttgcagcgccacaggctctttctgcccggattcctgagcttttacgcacgcgtcagttgtcactgcggcaatataaccgtcccatgccgtcggaccgctgacttcgccttttttccggatcgaatcaatgaagtcttgaatttccacatcatacgcagccacaaatcggcgctgccaatccatcaggatatcggtgctgaatttcccttcttttctcaaactgatgcttgacggttccggaagcttgatgacgccgtcttccccgacgatctcacattgaatgtcatagccgtatttacagttcacgtagatttcggcattgatgacgatgccgccttttgtttcaatgatgaccatctgcggatctttcagatgcggcagcgcattttttgatttcttcggatagatgacctgtacggattcatagtcgtcattgacgagccagtggaggacatcaatttcatgaacgagcgtatcgacgacggccatgtccgttgaataattcgatgcgactgtcgggttgcggtgcgcacagtgaatcatcagcggctcgccgaccacgcggttgtcgatcgcttctttcagctgaacgtaaccgctgtcatatctgcgcataaaacctacctgcaccaatcgttttcccgtcttcatttcttcctcgacaatgcgcatacagccttctgccgttgtcgcaagcggcttttcacaaaacacgtgcttgccgtgctgaatcgctttcaaaacgctggactcgtgagccgggccccagcttgtcactaagacggcatccacattttcagcagcgaggaggctgtcgtcatcaggataaacggaggcgttcaaattgaaatcctgaacggtctgctgcgcggcctcctgattcacatctgtgacagcggtaatttccgcacccgacagcttatttgtgatgcggttgatgtgctcttttccgatagcaccggttccgataacacctatacgtaaattcattgatcgccactccttctgataatcaaataatggttctcgtctttcttttcccgctgccgtcctgaggagcgccgtaaagttcctcctgtatctgttcaagcgacttgccggacgtattcggcgcgaagacaagcccgatgatcatactggccgtcacacatatgagcagaataccggccataaaaccgatgccgaattgtgacatgatgaccggcacaaataaactccaaatgccgattgaaatacggacgagaaagaacatgagcccttgtgctgacgctctgtattctgtcgggaacagctcgcttgcccacagctggtagttcgcctgctggccggctccgttattgatgccgatcgctaaaacaaacaaaagcagcatcgggagcccctgaaacggcagtaaaaacagcgaccagccgacaacggccataaaggcacagattccgaacaccgttttccgatatttatctgcaaaaggcatgaagatacaggcgacgccgagcccggtgaagataaacagggccatctgcagaatgttggccgtatttgcggatacgccgccgacctgctggtagatgtacggcatgaagaatcccatgacgcccgctgcgagattccatacgagaaacacacccattaaaaacaaaatgttcttgaaaaatttcggctgaagcaggtcaaaataagatgtttttttcacggcggcaggccgctcttcactgtttttccaggcatccgactcaggtaaacgctttcttatcacatatgtgatcagggcgatcaccaatagatgcgcaaagacaattttatttcctaaaagcccgaggtcaccgaccaaaacggataacagcagaaccacaacggctcctgcggcccacgccacctgcgccactccgcaatgcctcgcccggtttttctcgggggcgttttccgcgataatggtccatgaagccgtaatatccgcgcctacagaaatcccgataatcatgtatccgcataacagcatgggaaagttgaatccaaacaaaaccaaacaaattcctaaggcgtagacgagcatactgtttgtgtatacagcttttcggccgactttatcagccaaatacccgccgagcagcgctccgacggccgctgatatcgcgtttgcactgaaggcgccgagcaatccgatctgactgtcggacagctttaaatagctgacccacatagataaacccgctgatcctgccacgatggaacctgcatcaatgtaatttgctaatgctgcggcgatggtccttttgctgaaagctgattccgccttggcactattcatataagtccccctctaatttgcaggatcaagcagttcactgtcgatgtactttctcgcaatcagcgcgtactcaagcggattggcgactgccgggtcttgttcggcttcgatgacgatccagcctgaataatcatgacggacgagcgatcggtacacttcggtaaaatcgatgcatccgtctccgggaaccgtaaaaatgccctgtaaaaacgactgcctgaatgacttgccttcctgtctgcaccgctccataatgtcaaaccgcgcgtccttgaaatgaacgtgtctgatccgatccatatgcttgttgagaatcgtcatatagtctccgtccgagatataggcatggccggtatcataaagtaaatggacataccgcgggtccgttccatccatcagccggtcaacttcttccgccgtctggacgcctgtgccgagatgatgatgaaaaaccatgtccagcccgtattcgtcagcgattttcccgagacggttcaagccttggcacagcgtatcccattcttcatctgagaaatgcggtttttccttaaatacatcaatgtccaagccctgaacgctgtacgtctgttcagaaacgatggcgacatccgctccgactttctgcaaataatcacagtgttctgtaaattgttcagccgttttttcaataccgtcatgtatgataaagctgctgaaccatttccccgcaatccgcaagttccggagagccagctctttattgaggacggcaggttcagggaaaaaccctcccacttccgtaccttgaaagccggcgacaacaatatcgcttaacaaatgctgcagcgtattcccggctccgatttccggcatatcgtcattgcgccacccaatgggagcgatgccccacagaatatcttgtttgcccatcgtgatgcctcccctctagtactgctttgcagacttcagcttcgtctctttcgcttcgtatgcccgctgaacgcttttctgctccgacacttccgccacgccgacatgccaccagctgtcatagccgtccgtcatcgttttcggcagaactttcatttcaattaaagtggatacgtcttgcgttttcgcatcttcaagcgccgctttcagttcttcaaccgtattggctctgtatgttttagcgccgtagccctctgccaccttcgcgtaatcaacgtttaaaatctgattgtcctctgtgcggaactcgcaaaaataactgccgctcccgtgatccatctgcagattgttgatacagccgaatccggagttgtcaaagagcaggacattgatttttttgttatattgaagcgcggtaatcagctctgagtgcagcatcagaaagcttccgtcgccgacgagtgaatagacttctttgtcgggatgagccagcttgaggccgagcgtgcctgatacttcataccccatgcaggaatagccgtactcgaggtggtacgtattcgggacgttggaatgccacagccgctgcaaatctcccggaagagatcccgccgaactgatgacgacgctgtcttcaggaatcgtgtcattgatggtcaacagcgccgttgtctgcggcagctcagtcccgagcgcgtcggcatactcgtttaacacatcctgtgagaaatggtttttaatttccggtttgaacgcgtcacgtgtaaaagtgaccttgccgagccggtcccgttcagcaagccattcatctttccagtctttaatcgccgtgccgaatgcacttttatatccatctaataagccgtgcagcctgccgagcgtcactttcgcatcggctacgacctgaaacgcgtcaagcttgtaagcctgcatgcggctgacgttgatattcaaaaattttgctttgtcaaaatcaaacgccgttttcgaggatgtcgcaaagtccgtgtaccgtgtgccgacaccgatgatcagatcagcctggcgggcggctttgtttgcggcgagggtgcccgtgatgcccatgccgcccagattgttggcgaaatcggcttcaaccgttgacttgccggcctgcgtttcgacaagcggaatgccgtatgtttcagaaagcgcgattaattcctcacgcgcgccggagtacttcgcgccgccgcccactaaaatgacgggacggctgctctccttaattctttccgcggcgcctttcagttcacgctcgctcggctgcatccggtcaatgtaatgaacgcgtttttcaaagaagctttcatcaaaatcaaatgcttctccctctacatcctgagatatgcagatggtcgccgggcccgcttttgccggatctgtcatcacttcaaatgcccggattaagctgctcatcagctgctcgggtcgggtaatgcggtcccaatagcgggacacgggctttaacgcatcgtttgtcgtgacggcggcactgtattcctgctccacctgctgaagcaccgggtcaggctgcctcgtcgcaaaggtatcggccggaagcagcagcaccgggatatgattggccagcgccgtacccgcggcagccgtcaagttagcggcacccggaccgaccgatgtcgataccgcgtaaatttttcttctcagcatctgcttgctgtatgccatcgcggcatgcgccatgccttgttcgtttttgccttgatagactttcaggtgcccggcgtcctgctcaagcgcctgcccgatccccaacacatttccgtggccgaaaatcgtgaagatgccctcaacgaacggctcttcttttccgtcaacatgaatgtactgccggttcaagaattgaatcagcgcttgtgctgtcgttaagcgaattgtcttacccacaaacgatcccaccttttatacgttctatttaccgttaagactgtgctgcgcttcaatcagttcgataatttcaccggcagccggcattgcttctgaggagctgtgtttgctgacgacgatggaagcggaagcgctcccgtattttaaagccgtttcaatatcccggccgctgacaagtccgtagatgaaggctgacgcataggaatcacccgctccgaaggtcttcagcacctttgttttataggcatgcgcccggaaaacttctcccgatctgctgtatgcgtatgatccgtcaacgccgtgcttaatgacgacaaggtcagcggagtgcgcaaacaaatggcggacggtttcatcgttacctccgccgctgcggttttccattacgtcaaattcgtcacgcgtaccgatgacgatatcggattgttccgccaccagcgtgtagtacacggctgtttcttctgccgattgccatgtatacggacggtagtcgagctcaaacacgacttttacgtcatgtttttttgcgatatgcaccgcttttaagacggcttcgcgcgacgggcttttcgcaagcgccgtacctgatacgagcagcattttcgcgtttgcgatgtagccttcattgacttcgtacggctcaagatacaaatccgccacgtcatcccggtacatcagaatgctgcactcttcaggactgagaatttccgtaaaagcgagcccggctttgcgcccttctctgtcaacggtcatttgtgacgtatcaacgccctttccctgcatataagaaacgatgaatctgccgtgctgatcgtccgggattttgccgataaaaccggcttttaatccgagcttggcgctgccgatcgcaatatttgccggggagcctccgacatatttagaaaacgtcatcgtttcttccatcggccggttgtattccgccgcgttcaaatcaatacacgcgcgcccgatcgcgacaatatcaaactctttttcttcattaaatgtatatttcatcgttatctgccactcctcacttgttagcgttccaggatccattcatgggccggatcattatgaaacttccattttcgtgtcggtcccgccattacattcaggtagtaagaggtatacccgtccggaacaccaaccgggtgatagcccgccggcacgatgacaacgttttcattttctgcggtcatcgtctcgtcaatcgagcggtcgtccgtgtacacacgctggaagacaaacccctgcggcgggtccgtttcatggtaataggtttcttctaaaaaggattcagccggcagattgtcttggtcatgtttatgaggcgggtagctcgaccagttgccgctgtccgtgtaaacttcaacaacgagaaggctgtttgccgatggatctgaatcggggagaatattatgaacggttcgtttgtttgccagcttgccgcgatgttccacaccgttgtcttccgctttaatcagctttgtcggaagctggtgttcggacggagaatagcacagcgcgaccctcgccccgctgacggctgtgattccaaaagagcggtcattggacacataaacgctgtccgtcggttttctttcaaatacgctttcacgggtgccgatgctttcaaatgtctgatcataatcagtgacggtgatttttcccgttaccgcaacgatgcagcactccgtctttttcaaatcttctgtatatgcggaaccgggagtgaggtcaacgactttgaatccgacgtatttgaggtctgaattggctgaagtgacgtcatgtatgatgttcacgccttgagacatctcatcggcctgcggtttgcgcagcaaatgactcatgtttattcctccttaattgatggtaaaagaaaacccggacggaatctcgaagccgtccgggccggctgtcagatcaattgaagtcaggagacgggtatcgtgccgtcacgacttttttacgtgtatagaagtcgacgctgtcttttccgtttgcgtgcaatgtgccgaagaaagaagacttccagcctgagaacgggaagaatgccatcggcgccggcacgccaaggttgatgccgagcatccccgcgtcaatattttcacggaagtagcggatcgcgttcgcatttgaagtgaacagacacgcgccgttcgcaaattcagactggttggcgatgtccaccgcttcttttaagtttttcacgcggatgaccgacagaacgggcgcaaagatttcatctttccagatcgtcatatccgtcgtcacgttgtcaaaaatcgtcggtccgacgaaatagccgtcttccgttgcgttttcacgtccgtcacaaagaagtctcgctccttcttcgatgcctttttcaatatagctgtgcgtgcgttttttgttgtcctcgcggatgaccgggcctaagaacacgccgtcatccagtccgtttccaatcttgatgtccgctgctttttcctgtaatttcgccataaactcatcggcgattccctcttcaaccgtcacaaccgcgcatgccatgcaacgctctcctgccgaaccgaatgccgcgccgataatgtttgtcaccgtatcttcaaggtgggcgtcatttaacacgatcgtatggtttttcgcgcccgttaacgcctgcacgcgtttcaaatgttcgctgccttttttgaaaacatactcgccgacaggttttgaaccgacgaatgagatggctttaatatccggatgttcaagaacgccgtttacgacgtcatgcgcgccgtgcacgacattgaagacgcccttcggcagaccggcctgttcaaacagctctgccagtttttccgttaacagcggcgtgcgctcagacggcttcagaatgaacgtgtttcctaatgaaatcgccatcgggaacatccagcacggaaccatcatcgggaagttgaacggtgcgataccgccgaccaccccgatcggatagcggtagttcgccgcctctacatccgtcgcgatggaggcgagtgaatcgcccatcatgagtgacggcgcgcccgctgcgaattcgacgttttcaattccgcgccccacttcaccgagtgcttccgtcgtgtttttaccgttttccaaagtgatcagacgggcaagctcttctttgttctgctggagaagctgctgatagttaaatagaattctcgcacggcgcggcactgccgtctttgaccatgtttgaaacgcctctgacgctgagcggacggcgtattccacatcctcccgcgtagaaatcggaacctggcacatcacttcttttgtagccggattgacaacgtcttcatattgatctgtcttactttcaacccattcaccattgatgtagtttttcagttttctgatctctgccattctcattgcctccttaaatagtaaacatcctgttcagctggataataacggatgaatatattcatcttttacatataaaagacatgaattaaacgcttacaaatgctaaaatgatggtgactcccaatcttcccatgtaaaagttggtcatgtaccggaaaaagcaaacggttacatctttcacttttgattttacaggttatgttttggtcatttcttggttacattgtaagcccaacacatcttcaagtcaatctaaaaaatcaaaattttttcattatttttatcatactttttttgatcgggaaaacaggaacttggagaaccgtgtcgaatcggaggggatgatccctcttttttatcatttgttaagtaactattgattaacttctggtgtttattatatattttaattactttaagaattctagaaggagtttttttatgaaactgatgcggattcaggagatggaagaatacattctcaaacatggagccacttcgctggatgagctgtgcgaggtattcaacgtctctaaaaacacggtcagacgcgatattaataagcttgcggaaaaaggggttatcaaaaaggtatacggcggcgtgacgtcagccgaaaaatctgtgctcgtcccttttgaaaaccgcaccattcaacatcaggatgaaaaaatcaaaatcgcccgctatgcgtcacggtttatcgaggatcacgatcttgtgtttattgattccggcacgacgaccaaatcgatgctggagacgcttgatcccgataagaatgtaacggttttgacgaacagccttgatattattaacgcggcttcatccatgaaaaatatcgacctgatcatcatcggcaataactacaaacggaagacaaggtcgtttgtcggcattgatgatacgagcacactcaataaatacaacattaacaaggcgttcatgtccgctaccgggacaacgatcacccacggcctgacgaactccgacttactggaatacgaggtgaaaaagagaatttccgaaaaggcgaacgaagtgtatctgcttgcggatcattccaaattcggcaaatccacgcttttgacatacgcgcctttcgaccggcttcacagcattgtcacttctcagcagctcgatgaggaatatacgaagtattgccaagagcatcaaatcgacattcacttggcatagcgttatagttaatagagaacgctgccgtatttttccggcagccgctatgatatccaattttttcagggggcgaaaacatgagcaaagtaacaatcggcaaaactgacctaaaggtatttccgatcggtttgggaacaaatgcggtcggcggacacaatctctatccgaatctgaatgaagaaactggaaaagaattggtccgggaagcgattaaaagcggcgttaccatgttagataccgcctatatttacggtgtgggccgttctgaagaattaatcggcgaggtgctgaaagaatgcaaccgcgaggatgtcttcatcgccacaaaagccgctcacagaaaagaaggcgatgactttgttttcgacaattcaccggcctttttgaaacaatcggtcgaagacagcctgaaacgcctgcagactgattacatcgatttattctacatccatttcccggatgagcacacgccgaaggacgaagccgttcaagcgttgaatgagctgaaaaaagaaggaaaaatccgttccatcggcgtatccaatttctctttggaacagctgaaagaagccaataaagacggcttagtcgacgtgattcaaggagaatacaacctgctgaaccgtgaggcggaaaagactttcttcccttatacgacagaacacggcatctcattcattccgtacttcccgctcgtatccggactgctggccggcaaatacgacgagaacacaaccttccctgaaggcgacctgcgcaatgatcaggcgcatttccaaggggagcagtttaaagagaacatcaaaaaagtcaaccagctcaaaccgattgccgaaaagcacaatgccgatacggcgcatatcgtgcttgcctggtacttggcgagacctgaaatcgatatcctgattccgggcgccaaacgcgcagatcaattaaaagacaacatgaaagcagcctccattacgctatctgctgaagagatcgcgtttatcgacaagctgttttcctaagaaaaaaaacacgccttttaaaaggggcgtgtttttttatgtttatatttttctcttcggggaatgaaatagttatctaaataaactattatgcgttccaaaagatgaggaggatcatctgtgaagaaaaacaccaaaaaatacctgatttactttttcggagcattaggcgggctgctttacggctatgataccggtgtgatttcaggggctttgttatttattaacaatgatattcctttaaacacgctgaccgagggattggtcgtcagcatgctgctgctcggtgcgattttcgggtccgcattaagcgggacatgctctgaccgatggggccggagaaaagtggttttcgtcctttcactcatttttattatcggcgcgcttgcctgtgcggcttcgcaaaccgtcactatgctgattatctcccgtgtcattctcgggttagccgtcgggggctcaacggcgctggttcccgtttatctatctgagatggcgccgacaaaaatacgcggaacgctcggcacattgaataacttaatgattgtaaccggaattttactcgcatatatcgtgaattacatattcaccccgtttgaagcttggcgctggatggtcggtctcgccgcagtaccggcggcgcttttattaatcggaatcgcatttatgccggaatctccgagatggctcgtcaaacgcggccgtgagcaggaagccagacaagtcatggaaatgacccacgacaaagaggatatcgccgttgaattggcggaaatgaaacaaggagaagccgagaaaaaagaatctacgctcggcttgctgaaagccaaatggatccgccctatgctgctgatcgggatcggcctcgccatcttccagcaggcggtcggtatcaacacggtgatttactatgcgccgaccatctttacaaaggcaggactcggcacttcggcgtccgttctcggcacgatgggcatcggtgtcttaaacgtcatcatgtgtatcaccgccatgatcttaatcgaccggatcggccggaaaaaactgctgatgtggggaagtgtcggcattaccttgagcctggcgtcactatcagccattctccttctggccggcctgtcagcttcaacagcatggctgaccgtgctgtttctcggcatctatatcgtcttctaccaggcgacatggggtcccgtcgtatgggttctgatgccggagctgttcccgtcaaacgcacgcggagccgcaaccggatttacgacattgattctgtcggcaaccaacctgatcgtttcactggtattcccgcttatgctgagcgccatgggcatcggctgggtattcggaatattctcagtcatttgcctctcatccttcttcttcgccgcttacatcgttcctgaaacgaagggcagaagtttagaagaaatcgaaacgcacttgaaaaaacggttctccttaaagaagcgcagcaaacaaaatcaaattcttaaacagcgcacactgtaataaaaaaaggaatcgcccccgctgggcgattcctttttggcgtcataccataactttgcaaatgtcattcgtaaactcgaccggatcatggatcggcagcccttcaatcagaagcgcctgattgtacagcaggtttgtgtataatgccagcttttcccgatcttgtccgtgcgcgttctttaaggtctcaaacacttcgtgattcgggttgatttccagcactttttccgctttgacctgctggctgtcaggcatagcattcaacactttttccatttcgatcgtcacttcgccgtctgtcgcaaagcataccggatgggattttaaacgtttcgacgctctgacgttctttactttatccgcaagaatctctttcatgctttcgaacaggtctttatattcgttctcttcggcttcagtctgcttttcatcctcatcactgtcgatgcctaagtctgcgcttgatacggatttgaactctttttcctcatagcttgtcagcattttgatcgcgaattcatcaatatcttccgtgaagtataaaatttcgtagcctttgtccgccaccatttcagtttgcggcagcttttcaatccgctcatatgaatcgccggacgcgtaatagatatatttttgatcctcaggcattctggacacatattcgtccagagtgacgagctttttctccttagatgaatagaagagaagcagatcttttaagacatctttattcgcgccgaaatcattatagacgccgaatttcagctgtctgccgaaagattcatagaaagattcgtatttttctcttttgttcttcagcaggctcttcagctcggctttgatttttttattgatgtttttcgcaatcagcttcagctggcggtcgtgctgcagcatctctctggaaatgttcagcgacagatcctcagaatccaccatgccttttacaaagctgaaatggtccggaagcaggtcggcacatttgttcatgatcagcacgccgttggaatacagctccaatcctttttcgaattccttcgtataatagtcaaacggcatgttttccggaataaacaaaatcgaattgtagcgcaccgctccatcgacgctgatatgcacatgggtcagcggtttatcaaaaccgtaatgcttctcggcgtaaaaagcctcgtaatcctcatccgtcagctcgcttttgttttttctccagatcggcaccatgctgttgaccgtctgttcttcctgaacttcttcaaattcgttctcgctgccctctttcggcttgttgaccgtctcttccattttgatcgggtagcggataaaatcagagtactttttcacgatcgctttgatgcggtagttttctaaaaactcatcatagctttcatcttctgtgttttcttttatttgcagggtgatttccgtaccgacggtttccttgtcacacggcgcgatcgtgtagccggcagccccttccgactcccatacatgcgcttcgtcactgccgagcgccttacttttcaccgtgactttatcagccaccataaacgccgcataaaacccgacgccgaactggccgataatgtcatggccgtctttcgagtcattttcttgcttgaaagcgagtgaaccgcttttcgcaatcgtgccgagatgctgttcaagctcgtcttttgtcatcccgataccggtgtctgtgacggtgagcgttctcgcttctttgtccgccgtcacttttatgtagtaattgtcttgatcaaacgttaatgaatcatcggttaacgccttgtaatagattttgtcaatcgcatcgctcgcgttggaaattaactcgcggagaaaaatttccttctgcgtgtaaatggagttaatcatcatgtccagcaatcgcttggattctgctttaaacttttttttccgcacttcagatctctcctttaattatgctttgatgttatgtaaaatcttttcagcatctatttatcatatacagtgacaattgtcaactaggattagcagatgcatatattgtaaatttaacatgttaatggattgatttcacccattttatcaataaaaaagagagaatgttgatcatcctctcctctctgcttctttccggcggccgaattccttcttcatccatatgtatgacgggtagaaaaacaaactaaataagataagagatcccaagtttcgcaaagactcatgcagaacatttcttacagtgagaggaaatatgatgtcctgaaatagaatagagataacggtgtaaatcacaaatcccataggaacaatggcataacaataaaacgctatctccttcttatgctgtatcttcaaaatatgtaaacctcccaatgatgtatatacataatattaacatatttaataggtatttagaaacagacctccgtatgtttatccccctattcagcgggaacagatataaaaaaggaggaatcgcaatatgggaagattaacagacaaaaccgcaatcatcacaggggccgcgacaggcatcggacaagcgacggcacgggttttcgccgatgaaggcgcccgcgtgatctgcggtgacatcaatgaaagcgaactgtatgaaaccgtcagcgccatcagaaaaaacggcggagaagcagaagcctttcaccttgatgtatcagacgaagaaaacgtaaagtcttttgcggacggcattcagcaaaagtacggaacaattgatattctgttcaacaatgccggtgttgaccaagagggcggaaaagtccatgaatacccggtcgacctgtttgaccggatcatcgccgtcgatctgcgcggcacatttctttgcagcaaatacctgattccgctcatgctcgaaaaaggaggctccatcatcaacacctcctccatgtccggacgggccgcagaccttgaccgctcaggctataacgccgcaaaaggcggaatcacgaacctgacgagagcgatggccattgattacgccagaagcggaatccgcgtcaattccttatcgccggggacgattgaaacgccgctcattgataaattggcaggcacgacagaagacgaaatgggcgaagcgttccgtgaagccaacaaatggatcacgccgctcggccggctcggaaaaccggaagaaatggcagccgtcgcgctcttcctcgcttcagacgacagttcttacgtcacgggagaagacatcaccgcagacggcggcatcatggcatacacttggccgggaaaaatgctgattgataagaagtggaaggaagagacggagtgacggtgaaaaaaaaacaagccagtgcaaaaatactggctgaacaagctgagggcgggttacttaaaccagcccttttcctttgatcgggtaatggcttcaattcgatttttcacttctaatttatccaggatcatcgaaacgtaattgcggactgtgccgcttttgatgctgagggcgtttgcgatttctttcgtgttttttccgtctgcgacaagctcgagcacctctttttcccgttcggtcagcgggttttcttcactatagatgtcctccattaattcaggtgcgtagacgcgtcttcctttcatgacgctgcggatggcgctgacgagctcatcgctcgggctgtccttgagcatgtacccgctgacgcctgcttttagcgcccgctgaaaatagccggagcgggcaaaggtcgtcaaaatgatgattttcacaccgctgtccttgagttcttctgccgcttcaagacctgatttcccgggcatttcgatatccatcagacagatgtcgggcgcatgtttttccacgaaatcgatggcatcctggccgcttgtgcctttaccgacaaccgtcatatcctcttctaaattcaacagcgaaccgagtgcgccgagcagcatttgctgatcctcggcaatgaagatgttgatcatctgctaccatccttttcttttgattttgaatcattcgggattctcatggtcagctttgttccggcggctgtatcgatggctaaactgccgtttgcgaattcaagacgttccctcattccaagcaggccgtgcccctttgaaaaaaagcggtcttctttgcattgaaagctgccgtcatcttctaccgtaatgacaacctctttccaaagctgctgaatggtgatgcggcatactttggcgccgctgtgtttcacgacattggtgacggcttctttaatgcacatgctgacgatgttttcgttcagcagagagatatgttttggcgcttctttttcttcatacacaaattcaattcctgccgcttcaagaatttgccgaacattgccgagctcatccttcaatcggatgcctttcatcgatgagacgatttgtctgacctcatttaaggaggtgcgggccgtctgctgcacgcttttcagctcagtgcgggcctgttcagggtccttatatatcagctttcgggcgaggtcgcttttcagcccgattaaggagagcttttgtccaagtgtatcgtgaaggtcccgggcgatgcgctgcctttcttccagcttcacaagatcggcgattcgctcatttgcatattctaatttctcctcaaggcgctcccgtgcctttctgcttcgaatgctgagcgggagcaggatggcactgatcagtgtaatgacgataaacggaatttgtgtcaaaaaccacccttttttcagaacaaggctgaagttgacggcaaccgccgcactgatgatatgaatgtaatataagatgtaaaaaggaactttgtctcggatatggccgatgaagtaggcgataaagaaggcgaagtaaatatagctgaacagcataactgagccggtcgaaatgccgatcagaagaagcgcccataagtaaagcggccagccttttgcaacaaatgcgaagcggtatgcgccaaagaaaacaagtgtgaaaatgatgccggccacgataacaaaggtagaagagcttttaaaaataaaataaaaaggcaagatgaaaaaaatcgtccatatataaggagaaatcccgttcagtttttgaaatttaaaatacttcttcatctttgttccaccttctgctgcttgtgtctaccatcactttatcaaaacaccgccttcattgcatcctcacgcatgaagagaaggccctttctgataagagaaagagccgcgcgccatatcaggcatttttctttaaaggttctttcggtaccggatggggcgccggttttttccgcgcctcccgaaaggtgacaaattgcttttcgtcctcatcccacagacggaatttcatggattcaagacttgttttaagcgtaatggtcggtacgttttttaaaggctcgtgcccctcatgagcggcttccagcttgtagttcggcactttcgggcttaagtggtggacatgatggtagccgatattgcctgtcagccattgcaaaagcttcggaagcttgtaaaaggagcttccttctaccgcggcctgcacatagtcccaatgctcatcggcttcaaaataagaatcctcaaacgtgtgctgaacataaaagagccagacgccgattgaccccgaaataaggaaaatcggaccttgaacaagcaaaaagttttcccagccgacaagcaggcacgtcgcagcagccaataagacaatcgccgcgttcgtgaaataggtgttccagcgctccttgcggcgggcgccttttacattgaaacggtttttaatcagaaatacgtaaatcgggccgagaataaacataataaacggattgcgataaagtctgtagcgtacttttgtccaggctgaggcttcgttgtattccttgacggtcatcatccaaatatcgccggtgccccgtttatctaggttgctgctcgtcgcatgatgaatggagtggctgcgctgccattgaaggaacggaaacagtgtcagcacacctgaaataaacccgaacagccggttcagcttcttttgtttgaaaaaggattggtggcagcagtcgtggaaaataataaagattcttgtcaaaaatcccgctgctataacagtaaaggcgagggtcagaagataggagacattgaggctgaagtaagcaagaaaccaaagggcaaaaaacggcacaaacgtgttgaaaagctgattgacactatgctttgtatcggcaccggaaaatgcagcaacctgcttttttaaagatgcttgtttttgagttgcggcgtgattggtcatgaatgtcatatccccttttttttattatgattccaagtataccgaggcgctcgcggcggttgtagtagcagccatcatgccccgaatatgacatttgtcatgtttggcggcagaatgctgaacaggcggcatatggaaggtatcttttttatgagggataaagccggacacttcatatcggcacttctcaatgaaaacagcaaaaaagaacccggcctgttttcggctgagttctttttcatcatccttacagcaaaatcacccgatacttcttcacatccaaaaactgcagaaactcccgggccagcatgtccggcgcgtggtcttttccttcatgaagacgatattgaatcaaaccggcgagcatggatgcgacataatatgcatagagttttttgcccgcctgaatgtgcaggggctgatgaagataaaacgattgcagcgctctgaacatttccggaatgacgtcaggcactccggagccctctctcagaaaatggacgagcggcaggccgtccgacagtgccgaaaagagacggacgagcgcggcttccgcttcttccatggagcaatcggcaggctctccttttaccgtcaataatccgatcagatcccggcatgattgatggatgatcgttttcagcaacgcttctttgttggcgtaatggtcataaaaagtggcgcggcggaggttgctttgacgggcaatatcggaaatcgtaattgccgcgtactcttttttttccgccattaagccgatcatggcttcttgcaaggcctgcctcgttcgggtcacccggcggtcggcgggctttttttcttcttgttccggcacccggcggccaaacagccagtaaaaccgtttttgagaaatcaaatcccacacctgtccgctgatcgcttccggggatgccccgggctcctcattcagccagtacaacacaatggcatacgtgtataaagcgcggtaatgaatgtacatatcctgttcagtcggtgagaaatccgcattgaccggtgacagcagcacatcatgccggaacacatcttttaaaaaagcatgaaagtgaaaatacggcattttattgcgatccatcatcgtttgaaaaaacacccgatgccgatcaacaaaagacagggtcggatgcactttttgccatccgccatgtaaatgaagcacatctttatgcttcagcgaatcatacagcgcttcgctcagcccgtctttcatttcttcctctatatcctctaaaatcgcatatttatcttcgtaataaaggtacagtgtcccccggctcacacgcgcccgttcggcgatgtccttcatggtcacacggcggatatcccgctctccaagcatggccaaaagcgcttgtttgatgtcagttgtcacagaatccggcataagagacactcctttcattagacagatcaccgcaatttgtacggtaacgtatagatgtgtttacgctgtctttgccgcaaacacacatcacattataataggccctgaagaaacaaaaaagcaaccagaggaggaagaccgatggatcagcatataaaagcagacatcaaacgcgtctttgagcttcagaaaaaaaatcaaaaaacgctgcgtgcttcaacagccgggcagcgcagagaaaagcttcagcgctttttagatgccgtcaccgcacatgaagaagaaatcattgaggcgatcagacgggacgtccgcaagccttatcatgaggtgaaaagagcggaaacgcagggaacgatcaaggccattaaagataatatgaacaatctcgacacctggatggcgccgaaacgcgtcggctcatccgtcagccccgacgctgacggcgtattaatgtacgagccaaaaggcgtcaccttaattctcggcccgtggaattatccgtttatgctgacgatggctccgcttgcagctgccattgcggccggcaacagcgcgattgtgaagctgtctgattttacgatggagacgagccatatcgccgcgacagttattcgcgaggcattttacgaagaagaagtcgctatttttgaaggtgaggtcgatgtcgccacagaactgctcgaccagccgtttgaccacattttcttcaccggaagcacgaatgtcggtaaaatcgtcatgacggcagcggcgaagcacttgtcgtccgtcacgcttgagcttggcggaaagagtccgacgatcattgacagcgactatgatttgatggacgcggcgaaaaaaatcgccgtcggcaaatttgtcaatgcggggcaaacatgtatcgcacctgactatctccttatgaagaaagaagtgcagagcacctttacagatctcctgcaaaccattgtcaatgcaggttttatggaggatgatcatacggttgaccgcaacaaattcacgcagattgtcaacgaccgcaactttaaccgtgtcaaagccctgtatgatgacgccattgaaaaaggggcgaagacggcgttcggcggcgtattcgatgcgcatgaccgcacgatttctccgaccgtgctgacaaacgtcacgcctgatatgaagatcatgcaggaagaaatcttcgcaccgattctgccgattatgaattacgaagatatcagtgaagccgttgattacatcactgaacgggacaagccgcttgccttgtatgtattcagccataatcaggagctgatcgattatgtgctgcagcatacgacatccggcaatgcttctgtcaatgatgtcgtcgttcatttcactgacgtcaaccttccgttcggcggtgtcaatacgagcgggatcggttcatatcacggtgtgtacggctttaaagaattttctcatgaaaaaggcgtatttattcaagcctctaaataaaaaaagaatccgcgcagatgacgcggattctttttttatgatttttttgccccgaatgcgagcagtttcgtataagtgccgacgtaaagcgtgccgtcttcagccagaaccggggaggaaatgacattgctgtctgtttgatagcgccatttttcattaccgtcagcgtcaaccgcatagacatttttatcgtcagaaccgaagtacacattgccgtccgcatcaatcagcggcgccgttctcacaggcccgtccgtatagaaagaccagttcatattgccggttttgctgatggaaaacagctcgccgcttccggaaccgatatacacattgccgttatggtcgatcgctaatgaagagctggagaaaccgtttaacgggaacgtccactttacagcacccgttgatgtataggcgtataagctgccgtcctggtttccggcgtaaacggtgccgtctctatcaataaccggataacctttaaacccgttggacgtcgtttttgaccatttcacttggcccgttccggaattgatcgcgtaaaagatattattgtacgttgccgtatacagagtgccgtttgatgctaacacgggagcggagccgaccacgccgtttgttttaaacttccacttttgcgtccatgtcgaaggcgacgtcggtttaatcgcatagatatagttatccagcgtcgacacatacagcgtgccgtcagatccgatagccgcatcggaactaggcgctccgctcagcggaactgaagttaaaatggttccggtttctttgtcgatgaaatacagttttttatcgtgagaaggaagataaatgacaccgtttgttccgagcaccggagtcagcgtataggtcgtcccgaggttttccgtcacccatttcacagtaccgtccggatgatacgccgtcagcttcccgtcttttgattgaataaatacggtgccgtccccgtcaaccgcggctcccgcaccgttttgaggattggccggaacattcttttcccattttaacgcgccatcggcagtgcttgtaaaccggctttctcttgaccagttgaacatcgtcggagacatcgcctgcgcgtcataccgtcccgccaagaaaccggatgccgcatgattttgtttaaataccgtttccgcagcttgagcagccgccggatgcagccattttgcccccggcagatcagaaaccgctcccacagataaagccgcagcaaccgcagcgccggccgccaatgttttcattcgcaatgaagctgtcttttttttcaatgtcagttcctcccgtttctattaaaagctgctatatcacttcgatcataccataattaacctatgaaatatttgtattttcggtagatttatagaacaaatgtcacatagcctgctgatgcttcggggatgatcgaaacgcggcaatataccacaccacattgacgataaaagccgcgcctgaccaaacgaaaaggccgtaataaagagacagctcctgccctaaggaaattgcggtcaataacgccaccaacaagacagccgcgcaaatgataagcccgattccgcaaaaaacggccatgatgattttcatgacacgaataccgagcatatacaaaatgagcgggaccgcatatataacaaagatctggccgacggcggcccacatgcccgcggaattaaaacgattcgcgttcggccccgtttccgcaagcggagaaagcgagacgaggaccggcaataaacaaaacagcagagcggaaagcaaggtcaccgcaaccgcaccttttttcttttgattcatgtgaatatcctcctcctgacaataacccggcttttttaccggtaatctgataatatgttatattttagcacgatttttacttaatttgagaatgttttgtcaaaaacgaatttacaaatccagaaaaatagatataataaacgttatggaaccgatattgattcataaagcgctatctaacaaaacacgaagtgatattttgacgtggcttaaacacccggaagaccattttgatgaaagaccttatcttgagcagggactcagtttccgcaccggaatttgcgtcggtgatattcaggcaaagtcggggcttgcgcagtccgtcatctccagctacctgctgacgatgcaaaaagccggcctgctggaatccgaacgaatcggaaagtggacctattacagaagaaatgaaaaacaaattaaagcctttgctgactatgtccagcaccagctataaccatgaaaggagggctttttttgttctgacatatctatttttctgtatatgtagttaaataaaaggaggcatacataacaatgaaaaaaagcagctccatcttcattctatttttggcactaggggttttcgggattatcacgaccgagatgggcattatcggcgttcttccgcaagtggcggacagatttcatatttctgcttcaaaagcggggtggcttgtcagtattttcgcgttcatcgtcgctgtgtcgggaccgtttttgaccttgcttgcttcaggtataaaccggaaagtcattctgcttttggcggtgctgatgtttgccgtttcaaatgcggtctacgcgtatacggcgcatttcagtgtcatgctggcgtttcggatcattccggctttatgccacccggtgttcttttctgtagcgcttgcggccgcggcccggcttgtccccgccggccaatccggaaaagccgtaacgaaagtcttttcaggcatcaccgccggctttgcgttcggcgtgcctttcacgtcttatctggcggatcgtctatcccttgaagccgccttcttattcggcgctatcatcagtctcatcgcattcacgggcattcttctctttttgccatccatgccggtcacagaaaaaatgtctttcagaagtcagctcggcatccttcgcaaaccggctttgtggctcaatatcgctgccgtcacctgtctctttgcggccatgttttctgtctacagttattttgcggagtatctcggacgggtgtcgcatatgaacggcacatgggtcagcttcatgctgatgagcttcggagtgattatgatagccgggaatttcgtcttcggcgctttgttatataaaaatatgaaaaagaccgtcattctgtttcctcttctttatacagccgcctacttgctcatatacggttttggaacgtctttcgcgccgatggccgtcctcgtcttcgtatggggcgccgttcattccggcggtctcattgtcagccagacatggcttactgcggaagcaaaggaggcgcccgaattcggcaacagcctgtttgtctctttttccaacctcggcatcaccatcggaacggcggcgggcggctggtttatttcacatttgggaatccatcagctgatgtggtgcggcatcatgtttgcccttctggctttcgggctgatcatgggacgcttggcatggggaaagaggcttctcgcagaagcttaagctccgttgcaaaatccggaatgattacgtataatattccagattaaagcaagggagagaaaaagatacatggaaagaccggcaggattttggattcggtttctggcttacgtcattgatcaaatcatcataggaattccgatttttatcattcaatttatggtctcttttttatttgcggcaggcgttgcggcggctgaccccttcatgaccgaaaatcagtttaacatctcttttctggtgttcggcgtcatcccgattcttgcgagctcttttgtgatcagtatcttatatttcagcctgctcacggcctcaaagatgcaggggacactgggaaaagcattgctcggccttaaggtcgtcaatgaagatggcggacggatttccatcggccaggccttcggacgcgctttcgcatatatcatatctaagctcattctttatatcggattcatcatgggcgccttcggagagaaaaaaacgctgcacgacatcatgtgcagcacccgtgttgtctataaataatgacctcaagtccgggccttttgagcccgggcttttttatgacggctgtgcccgcctgatgtcaatgccgccctttccgtcagcctcaatgcggatcgtcgcgttcacaatgacagacagcggatggaactccgcatgctgatcagaaaaaatccagcggcggccgctcggccctaaaagcaaaaacgccccatcattgtaatcacccataaaatgaaacccgttttccctaagaggcgcatgctttctcaccggaatgccgaaacgctgcagctttctcccggttgatacgacttcggcagccgtcagattcacctcgccgatattcagaacggactcaatcgaaaaatgttccgcgcttggcggcgatgtttctctcgcgatgaattccgccagattgttggacggatctttgaaataaaaggaacgcgcctgaatatgagagaaatacacctcatcctccccatcttccgtttgaaaaacgactttatcctttatccacgccttcgcctcatcaaaacgattattcggaatgttaaacgcgaaatgatacgtaggatgagagtgagaatcggcgcgcctgaattccaactcactttctcccgccttgatggtaaacgaatcaccggactcatcaattaaaggaaaacctaacacccgttcatagaagtgtttcgtctcctccaacgcacaactgtacaaagtaatgttatttatttgcatgatcataccccctttggtttatactgccatatagaagggttgattcctactgtttcgattcaccaattgagaatccccctttcgcccggcgctaaatatgacaaacagcgccaaaccgcttataccaggcgtttttaaacatctaaagcaaaaaaagcagaaaataataccccatatagcttgacaaaaaataaatgttatttaataatctatatataattagaattattattgaaagataaagtgaatgctttgtctttttaatatatttcaaatcacatttcaggaggaagatattatgtctttaatcggaaaagaagtactgccattcgaagcaaaagctttcaaaaacggtgaattcatcgatgtaacaaacgaagatttgaaaggtcaatggagcgttttctgcttctacccagcggatttctctttcgtttgcccgactgaacttgaagatcttcaaggacaatacgctgcactgaaagaattaggtgttgaagtatactctgtttctacagatactcacttcgtacacaaaggctggcatgacagctctgaaaaaatcggcaaaatcacttacgcaatgatcggtgacccatctcaaacgatctcccgcaacttcgacgttcttgacgaagaaactggtcttgctgaccgcggaacattcatcatcgatcctgatggcgttatccaaacagttgaaatcaatgcaggcggtatcggccgtgacgcaagcaaccttgtaaacaaagtaaaagcagctcaatacgttcgtcaaaacccaggtgaagtctgcccggctaaatgggaagaaggcggcgaaacacttacacctagccttgatttggtaggtaaaatctaaggagtgcattccattggtacttgatgcaaatatcaaagcacaattaaatcaatacatgcagctaattgagaacgacattgttctcaaagtaagcgccggtgacgatgacacttctaaggacatgctggctctcgttgacgagctggcttccatgtcatctaaaatttcagttgaaaaaactgaattaaacagaacaccgagcttcagcgttaatcgtaccggagaagacacaggcgttacattcgccggtgttcctctcggccacgaatttacatcattagtgctggcattgcttcaagtcagcggcagagcgcctaaggctgatcaaaaggtcattgaccagattaagaacatcagcggagaataccgcttcgagtcttatatcagcctgacgtgccacaactgccctgatgtcgtccaagcattaaacatgatgagcgtgctcaacccgaatatcactcatacaatgattgacggcgcggcattcaaagaagaagtggaaagcaaaaacatcatggctgttccgactgttttcttaaacggtgaatctttcggaagcggccgtatgaccatcgaagagattctcgcaaaaatgggcagcggcgcagatgcgtctgagtttgccgacaaagagccgtttgacgttcttgttgtcggcggcggacctgccggcgcaagcgcggcgatctacacggcgcgtaaaggcatccgcaccggtgtcgtcgctgaacgcttcggcggccaggtactcgacaccatgagcatcgaaaacttcatcagcgttaaagcgactgaaggaccgaagctcgctgcaagccttgaagagcacgtgaaagattatgatattgacgtcatgaaccttcagcgcgcgaaacgccttgagaaaaaagacctcttcgaacttgaactcgaaaacggcgctgtactgaaaagtaaaacagtgatcctttcaacaggtgcccgctggcgcaatgtcaacgtacctggtgagcaagagttcaaaaacaaaggtgttgcatactgcccgcactgtgacggaccattgtttgaaggcaaagacgtagccgttatcggcggcggaaactccggaatcgaagcggcgattgaccttgcaggtatcgtcaatcacgtgactgtgctggaattcgcgcctgaactgaaagcagacgaagtcctgcaaaaacgtctttacagcctgccaaacgtcactgtgcacaaaaatgcacaaacgaaagaaatcacaggcgaccaaaacgtaaacggcattacgttcgttgaccgtgaaacaggcgaagaaaaacacgttgaactccaaggtgtattcgtccaaatcggcctcgtgcctaatacagaatggttagacgaaacggtcgaacgcaaccgcatcggcgaaatcatcgtcgataagagcggcgcgacaagcgttcccggcctatttgccgcaggggactgcacagacggcccgtacaaccaaatcattatctccatgggatcaggtgcaactgccgctttaggcgcatttgattatttgatccggaattaatgtgaaagccgccatatgaatggcggcttttttaaatatactaattaagaaggcagtatttcctctaaacaatcctcgctgattttataagattttggccttctgcttaccagctcaacaaacccttgctgttctaaataatccattactctgttaattttatgtctcgatttatttgagagctccattaaatcttgcaccgacagcgtaacctgatcatttacaaatacattaatcgtgataatgatattaaaaatatcacgttcatctttataatcagcccattgatcgctatcaatatagttcctaattcgtttcagtttcattaaattaaattcaagatcctcaataattcctttttgtcctgacagaagcaattccagcatatccattaaataaaaagtcagctctccccggtttaaaggtgcgggaatttcctctaatgccttataatacttatctttgttcttattaactgcgtaagaaaaagtgatggctgaatatttttctaagtatcgggacaaataactcccaacgataaggcgtcctgttcttccattgccgtcataaaaaggatgaatgtattcatagtagtaatgagctgtcatgtaacgatacagctggggatgtgtttcatcatgaagataagcaattaaagcctcaagcgcttctgttatcttttgttcagaattaacgccgatatgggtggtcatgttcccatcgttcacttcaacatagccttttctgaatagctcaccatccggcgcatcttctgttccgatttcatctgcgaccagctcgtcatataattccctaaagtcatgaatgcttgtaaacgacggaattcggtctataaattgatatgttttcatcaacccgacaaaccgcttatgtgagggctcggattgttctaacgctttaagagcctctttcaattctttttttgtactgcggattccttcaatttcattattactctgtgcttcattaataattaatttatcaaaataaggtttgacagcaaattcagggagctgactgataagggatgaaattttggaactgtttaacaacacttcattattcagcttcatgagtttatgtgtattcacataaaatagctcaaatgaatcgtccgtggatcggccttttcggaacccccgtatgtttaatgatgttgaataactgccatagctgcttgttctctttttaaattctttctcatatgaatcagcatccattttataaaaaagcttagataacttctcatacttcatattatcacctcgcttaatttaaaattatacactttttttaaattatacaatcattatagcctgatttctaacaaatattctcgctttccaatcaaaacaaaaaacggcgtactgcatggcagtacaccgtctgaagcaattcaatctgtctttctccctctcgcccgatagatgagaaataatccaataaaccacagcggcgtcagcagcaaagccgggcgcgttgcatccgcaaacagcataatcaccagaatgacggcaaacagcgccagcacggcgtaattgataaacggcgcaaacggcgccttgaaagacgagcttgcatgtaagtccggacgggttttcctgtatctgatatgacagacaagaatcacgccccacacccaaatgaaacaaatcgcgctgatggtggtcacgatgccaaaagccgcttccggtatcaatttgcttaaaagagcgccagctgacagcacaataaccgatatccataatgcgcggctcggcacatgatttttattcagcttcgcaaaacttgccggcgcttgtttcgttttgcttaagttatacaaaatccggcttgttgaaaacatcccgctgttacaagcagaagcggcagacgttaatacgacaaaattaatgattcctgcggctaacgggatgccgaccagactgaaggtctttacaaaaggactttccgccgcattcagctgcatccacggattaatacataaaagaatgagcaatgccccgacgtagaaaaataaaatccgcaatggaattttattgatagcggacggaatattttttttcggatttgacgtttccgccgccgacacacccactaattccacaccgacataggcgaagatcaccatctggaacgaaagcaaaaagcctgaaaatccgttcggaaacaagccgccgtgctcccacagattcgccgctgaaaccgttccgatatgcgttttgaacccaatcaccagcagaactacaccgatgacaattaacgcgagaatcgtgactaccttaattaaggcgaaccaaaactccaattctccaaaaatcttaaccgttaacagattaagccctaataaaatgagcaaacagataagtgccggaatccactgcggaatatcaaaccaatatttcacatacacaccgacggcgatcacatccgccatcgccgtcataatccagcaaaaccagtaggtccagccggtgacaaacgctgcacgcggccctaaatacgcctcggcaatatccgttaatgattggtagcccgctttagataacagcagttctcccagcgcccgcatgacgaaaaaaagcgcaatacctacaataaaatacgcaaagatgatagaaggacccgccagctgaatcgccttaccggaccctaaaaacaatccggtgccgatcgtgccgccaatggcgatcagctgcacgtgccgattcgataagtccctctttagctctcgctgctccacatctgactcctccttatctctctagtgaacgacgagcaaaaaaagccaataaaaaaagagattggatgccctccaatctcatggtcataagaatatcaaattatatctgcgccgctgacaatcaacagcatgacaaatacatattcggtactcttctgtccttttgcctgagattgtgaacccttcggcgccgcggaaaacccgcggtctctccagaagccgctcctgctgtagttcgacccacagcaatcatagcctgctacgtattgagtttctgatagaaacacctatcagctaactttttattttaatggaacttgaatgcattgtcaatagagggatgagctgcacggcgttatcccggtccaatttttgatgcctgaagcgcgtattttccgttttcattgtctcaaaaaggcgttatgcggtactatcatataaggtctaatcatttaaacattatgtcatactttaaattcactttatcatacaattgctcgtaaataaaaaggggatggacgagattggaaacgaaatatttagatctgctcgcacaaaaatacgattgtgaagaaaaagtggtcacggaaatcattaatctgaaagcgatactgaacctgccgaaaggaaccgagcatttcgtcagtgatctgcacggggagtatcaggcattccagcacgtgctgcggaacggttcaggaagggtaaaagagaagatccgcgatattttcagcggcgtcatttacgatagagaaattgatgaactggcggctttggtctattatccggaagacaaactgaagctgatcaaacatgactttgatacgaaagaggcattaaacgagtggtataaagaaacgattcaccggatgattaagctcgtttcttattgttcttccaagtacacccgctccaaattgcgcaaagcactgcccgcccaatttgcttatatttctgaagagctgctgtacaaaacagaacaagccgccaacaaagaacaatactactccgaaatcatagaacagatcattgcgctcggccaggccgataagctgatcaccggccttgcctacagcacgcagcgtttggtggtcgaccatctgcatgttgtcggcgatatttatgaccgcggaccgcagccggataagatcatggaagaactgatcaactatcattcagtggatattcaatgggggaatcatgatgttctctggataggcgcttattccggctcaaaagtatgcctggcaaacattatccgcatctgtgcgcgctatgacaatctggatattattgaagacgtttacggcatcaatctgagaccgctattgaaccttgccgaaaaatattacgatgataacccgtctttccgcccgaaagcggacgaaaacagaccggaagatgagattaaacaaatcacaaaaattcatcaggcgatcgcgatgatccaattcaagcttgagagcccgattattaagagacggccgaactttaatatggaggaacggctgttactggaaaagatcgattatgaccgcaatgaaatcacgctgaacggaaaaacatatcaactggaaaacacctgctttgcgacggtgaatcctaaacagcctgatgagctgttagaagaagaagcagaagtcatggacaagctgctgttctctgttcagaactccgaaaagctgggccgccatatgaattttatgatgaaaaaaggcagcctttatttaaaatataacggcaacctgctgattcacggctgtattcccgtcgatgaaaacggcagcatggaaacgatgatgatagaggataaagcttatgcaggccgtgagctgctagatgtttttgaacggttcttacgggaagcgtttgcccatccggaagaaaccgatgatctggcgacagatatgacttggtacttatggacaggcgaatactcttccctcttcggaaaacgcgccatgacaacctttgagcggtatttcattaaagagaaggaaacgcataaagaaaagaaaaacccgtattactatttgcgtgaagacgaagcagcctgccgaaacatcctgaaggaattcggcctcaacccggatcacggccatatcatcaacggccatacaccggtaaaagaaatcgaaggcgaagatccgatcaaggcaaacggaaaaatgatcgtcatcgacggcggcttctccaaagcctaccaatccacaacaggcatcgccggctacacactcttatacaactcttacggcatgcagctcgtcgcccataaacacttcaactctaaggccgaagtgctgagcaccggaaccgacgtcttaacagtgaaacgattagtcgacaaagagctggagcggaagaaagtgaaagaaacaaacgtcggtgaagaactgatgaaagaagtggcgattttggagaagctgcgggagtatcggtatatgaagtgaagaatatggagttcagggatgattctctgggctctttttttttacggttacggactaatgagtccctttccctgtatgtaaaacggatttaaccgcttcttcaatctccctataacccgtacatctgcaaatattggactccagccaattttttatcgtgtcatcacttgcattcggctcagtattcactaaagcatgacaattcatgagaaaacccggtgtgcaataaccgcattgaaacgcgaatttttcaataaaggccttttgaatcggcgtattgatcagtccttcaattgtcgtaatgtcctttccttccccttctgccgcaagcattaagcaagatttcatcggcaccccgtccgttaataccgtacaggcgccgcaatccccatttaagcagcccggctttgcaccagttaatccgagacgaaggcgaagagcaaataacaaagtatcagccggtctgaccgtaatctgtctttcctcgccatttactttcaacgtaataggatcagacatttggacctccttctaattcccgtaaggcatctaaaattgtatgttgcaagacaaatattcggtattcacttgagccttctgcatcatcaagaacaggtttgggtacatattgtaaagacctgcgtactctttcttctgctgatcggcttttatcgttaagcacagcctccatttcagcagaacgaaacggaaatggacatacgccgctgaaggccattctgatctcatcatcttttttcagcgcacagactgtcaccaatggatacccgacattccactgctgtcttcttttgatactgacaaatggcaggtcaacgtacgctcgatcgacaacgacatgaaataaaaaatctcctttttgcaattgtatttccttgttaaatactttatttatgggacggtaatgaatccccgctctccctgcaatccctatcaaactatcagaaatcagcaacggcagcacggcctcacggtaatagatgcccccgcaaatgtttccgcccaggctgatcttatttcgagtcgtccgatcagctatttcactgactgttttacttaatagcggaaatggattttcttcctccagtttcgttaatgacacgcctgctccgatcaccagatcattttcataaaagcggatggtttgaaatcccggaagcgcgttcatatctatcaccgcatccgtatagatgatattcagccttcctaacgtgataatttccgtgccgccggaataatacattggtgttttcttttcggccgcaagcgagtgaaacaggcgggttgtttcttgaatggtcttcggtttaaaatagtcaaaatcaaacggtatcatctttccacccctcttgcgtcctccataattgttcgggaatgagaggaagttgattcaattggacacctaaagcggcggacaggcaatttcccaatgctgccggcatccccaacagtccgtgttccccgccgccgcgcgccccataaggcgcaatcacatgcggggtttcaacaaattcaatgatatattcaggctgctctccatagtgaagggggcggtatgttctaagctgaggatttaatactctgccatatgaatcaaagacaaaggtttctcttcctccaaatgcgattcccatactcatcgcccccatcacttggccccttgccgctttttcattcagtacagttcccatatccacaacagaataggctttagtaattctgtacgtataatcccgtttatccaactcaacttcaattccctgagcaccgacagcccattcgggtcccggctttcctcttcccgtttcccggtctaaattcgtcatccgggttaatgtgtaattgccgctcgcaatgatttggccgccaatggtatttccatttggaaacgtatatccgtaagcaatgtcttttatttcaacatgtacagaaggatgatctataaaataaacctttccgtcggcaacttccaattcctcgacaggaacccgcaacacacatgatgccacgtccttaagctttcgaatggcttcctccgctgcattcagtacggctcttccggccattaacgtccctctgctccccacggttttccaatgctcgggtgttgtttgtgtatctataagcatttttacgtgaattttgcttatatccattttcattcgttccgccaggatttgggctagcactgtttttgtccctgttccaatttccactacccctgacatcaaattaatgcttccatcgggattaaaggttaaaagaaccccggacgttgcatttgtatcaaatgttgaggttttccaaatgcagctgattcccttcgcccgtatcttccggccatcgatttcaattcgctgtccctcgtcccaattcattaattcctttaatctttcaatgcacttcggcacatttccgaccgtgcttgaattgagaagaacttgagtaggtgtggtgtcaccggggcgaatggcatttttatagcggagttctaacgggtccatgttcagcttttccgccaatacatccatcgtccgctcaaaggcaaataacacttcagcatggctgtagcccctgaatgcacttggatatggatgattcgtatacatacaatatgaatcacaccgtatatgatcgatagcgtacggacccgtacaatcaaccaccgcagcccggctgatgtccactcctttatcagaatacgctccgccatcaaataaaaactgaatgtctgccgcctttaagattccatcctttgcagctcctaatttgacaatggcatccaaccctatatgaacgggagatgtgatcatatcctcttctctcgtattaaacaatttgacgggccggcctccaaccgcttttgatgccaaataggcaatcacctctaactgaacggctgcttttcccccgtacgctcctcctactaaaggcgttttgacgataacctttccgggttcgattccaaaataccactgcattaattttttaatggcaaaaggagcttgagaagatgtggtaatgataatctcctcatccgcgcgaatttcagcaatcgagcatcttgtctccatcgcagcgtgatcagaagggttaaaggaaatctggaattctgctgtcacatcactttccctaaacccgtcttcaatatttccttttctaaccttatccaggtttgcgatatttgtcttcggaaccgggaatacaccttttgtcttctcatagcggtccgcattttcatggacgagtggcgcatccttttgaaaggcctcacggggggaattgacgacgggaagaggtttataagatactttgatggcatccgctgcctttttagctgtaattggattttccgcaacaacaacagcaaccggctcaccatggtatctgacccttttataagcaatcggcgatctgtctttaatttcctcacctgcaagcggaaaaggttcatcacccaatatcgctctcacgccgggaatcttccaagcctctgaaaagtccatagacacaatatcggcatgagcatatggactgaccagcattttcgcgtgtaatgtgcctgtttcttgaaaatcatccgtatatttcgctttacccgtcactttttcaagggcctcttttcgaatgacactcttcccgatatactccaactcattcactccccgaatttattcagcagcagcgtataatcttcaactgtatcgacgtcataaaaaagcaaagggtcttgaaagctgatcatttttcccgtattgatcatactttcacggatgacatgccgggcgccctgatctccctttaactgatgcaataccggaaaacattgatttgagaataaaatggggggcataggaagatattgattttcagcggcgataaatgaataacagggctccttttgataggaatcaattaacgtattgatgatatctgcggtgacaaacggctgatctgcaaggagaatgataacagcgtcagcctcgtactctgccgctttttttacaccgcattgtatagaatggccttggcccttacccgcttgctcacattctgcctgactccacttatttgataaaggatttaaaaagaaaacatccgaaagccaatgcagtggatctccctttcccgtaataacgaaaatatgatctaattcagataacaaggcatttttaagagccatacttccaagggagactccattgagaactaaacttcgcttatccgtccccatgcgtctgcttgtaccggctgccaggtaaatggctgctgttttcataagagagacctttgctttcgcatttctttaatcatctcgccgacaatacttacagcaatctcctcaggcccttgtgctccgatggaaagcccaataggggaatgaatatcctcgggaatctcagctccgcctaatagccgctcggtgcgccttctggggcctaatacacctttataaaacacattctcgttttttaatgtatgtaaaatgatctgatctttttgaaagctgtgcgtcataatgacaacaaaatctctttgggtcatgctcaggccttccatgacttcttccggtgctcctgttatcaaatggccggcttcaggaaaatggccgtgatgacataaagcgggacgccagtcaatcaccgtcacatgaaagccagtgccagctgccaaagaaactaacggcttcgcatcttcccctgctccgaatacatataaacaaggttttggcaccatctgatggataaaaaataaatcagaggtatgttcatccctcttgattcccttttccgtctgtctcagtttttgaatacggccttgttccataacatccccggttccaaacacttcgccatcttccactatgtacagatcttcctttggctctaacgttttagtgaatcgtttcattcgggtcacagactttttttcatctaagcatgtcttgactgtcatcagatttcgttccaattccccttttacaggctcaagtaaaaccgtcaaaacaccattacagccaatgccctgtccccaggataaatcgtcctccgcgctcatatcaaagcggacaatcagcggctctcctgcagcccagacctgttccgaccgttcaacgaggtcttcttccagacagccggcggataacattccgactcttgttttatcccctaaaatcagcatggaggccccttctttcttataagcggacccctcagttttaatgatggtagccagtaccttagctttcttagaattggcgatgacatccaaaatccggtgtatatcatccatttcatgtcccccgttttacctgatcatatctgcatctgtatatccgtattctttaatcccggaaaacattacaaacgcttcagcaatttcttcgtttctaaaaaaaaagagtctttatagaccttatgaccgggcggcgggtgagacagcatgtcggaacggagagattccaataacatgatctgttccttctgtttccaattgtctgtttcaccctgctgtatgcctttaaaacccgcaaagtattcacttaacacttgtaaatcattccccagctcccttttgtcacttgaagataaagctccttctttttcccattcttttaacgttttcactatatttgatagatactcaaatccggcgttcaacttttgcatctctatttgatagcttgaaatgatgattttatgtttttttctgacggggttgaattttaagctgtcagaggctgtttgcagcatctcttttgtcatatgcagctcttgcagaagatggttcattctatacgccataaggttcccttttccttgcccccactctgattgtacccatttggaaaggtctgaaagtgtgccggaaagctgacgagccaatgtttgaaaagagtccgctgccttttttgtgtagtccggcggaaaaaggaacatgtgaaccagtatggcaatgatgacgccgatcaccgtatcgatgattcggtcgaatgcataatctttagcgtttcgttcaaacgtaaagaccaacaaaatggtgagcgctacctgatgtaaaaccgttacatctattcgtaaccacttcgcaatgtaagtaccgcctaataggaagagccccagcatccagccattcattggcaaatgactgacaagaaaggaagttagcatgatcccaatcgcagttcccgcaatacgatgaaaagaaaagcgaattgactgatctatcgttggctgcaaacataagataacagaaagaggcgctaaataggggtgatcagagccaactagttttgccgcttcccacgaaacagcagatgcaatcgccatcttccaaaccaaagatgttttgttttgaattttttcacttttcatcatacgccccctcctttcagaaaccttttccactaggtttccgtgacgcaaagggatttatactgtcgtgtggaaaaagcggaagaagctgtgattcaaggggggaattcttgaatgacagcttcttttttggggttgggaacattgggaaacggaaaaatgatcgtcatcgacggcggcttctccaaagcgtgtcaattcacaaaaggcatcgtggctacacgctcttatacaactcctacggcatgcagctaggtgctgataaacaatttgactcaaaggcagaagttctgatcaccggcaccgacgtcttaacggtgaaacgattagtggacaaagagcttgagcggtagaaagtgaaggaaacgaatgtgggagaggaattgttgagggaagtggctattttgaagaggctacgggagtatcggtatatgaagtgagggtatgaggtttagggatgattccttgagctctttttttatttcatttagcactgcaaaccgcaaacattattttaaatgaaaacaaattttgaaaaatgaatgatcagcaaacagactaaattccgtggaagataaccatgacgttattaatatgtaagagaagaatgaaaaccaatacaaacgctgtttttttaggtagaatcgcctttctagagatgggtctgttatacatttacatctttgcatttagaattgataatagaagcttacctacaaattgaactaaacgaaatcatgcttgggagacttcaagaaatacttatttcatctgctcataaaatgtcgattgagtaaataaaaagacgtttaaggtatgactaataaaattgaattcaattttatttttatagaaatcaacatgttcgtgcccttttcatttttacacgggctaatcgtgaaacaggtacgatgacttacagccgacaagggataatacctttaactccttaaaacaccaaatgcgtcctccctcttcattaaaaaactcagatgccggagcaacctcaaattttaagtctaaagaaggagtaactcatttattgatcactcgataaaatgcaatttacatttagaagagtatgaataaaaatcagttaatccatatattattaaattttagtttaaatgttttcctcacattatcatggaaagataattaaaaaagtcgcccattgaatagttgaacgactttcttagtaaattctactttaagatttcctcattgatagctttattaaatccattccgtctatagaaaaatcagttccataaaaaacggaaagttctaaatctccattaactttggatctcctcacttctccaatcccagtgaatacaatatcctgatttttgttttctttttgatactttaaaatgtgatgaaataaccctaaataagctggactattatttatgaatacttcttcaaacttaacatggatatttgttttaccctcttccacaatgatatcagctatcgattctattaatttcacactctttacttttcccattactaaacgaggttttccattatcaatatcctttaacatatccactgtccttttggggaggtttggtcctctaatacctatccttcgattagttacctcttcaggctgatctccatcttgtaaaacagcgtgagtcacgggaacagattcctttccaacagtagtcggattattttttctggttggtttctttgttttctctattgtcttttcatcatcagacatagtatatagcttataagcttcttttaaagccctttttttcctctcagcagtgagttcaacattaataaattgagtagtatcaacacctaccctttttttagctctcgtaaaaccatgaatacaatcgtcaatatggttatccatattccatgttcttaaaaagctttttacaccagaattataaataacccttgcaccgcaattcttagtaggacaatagagataaccttttaaggtttcattatataagtcgggcgtgatatcactcttttcatattccttttctattccatctttaataaaccttgctgttaatattgccaatatatctcctgctttcttgttggttattaagccgaagaaataaaagatagaggtctaagtttgtcttactccaaattaacattcctgtaattttttactatattttaaacaaacttaataggtgttgatttttttaccacactatgttattcttttaaaagtcaattagttataaaaattattagtaagactaaaagatatttttatttaaaaatgcggcaacatttttaaataaaagaaaattcaattaataacacagcctcatacttctacaattttcgaccttttctaaattatagcataggtctatttgtttagcaaacatttcccatttttattctctcaatcatcagattacaacacaaaatccattaacaaataaataaattttcgttttaatattacttgtaaagtttctaagtggggattactccatttattttcataccttccatgtgcaacaagaaagatttcttttaaaaagcaatcttctaattttccgttttttagtgttttcttcttctaagtactcattggctaaagatggtgtacattactaatatcgaatatatcaggtattgtatcaatatatcttgaaggaaagattagcagtaatataaattcttttaaaaattttacacatttaggtgatgcccagtttcattttctttttttaaaaaagcatgttaataagaaaatattagtgatttttttagaatctctaatgatgaaatgagtatttcttttaagaactgtatttacatgagagtatattatacctagaatttacctattattctattagtaatgcacattagtatagattcgaatgggaaaattagataataaaatatataaggaattgcggaggtgcttaatgcttatggagatagaaaatatcgaggaaattccaatacagaaattttatttttcaatgtcgcatctttctcatataagccaagtacaagataatttaccgtcccttttgataagagatttatatagtattgtagatacatactacttagaatctttatcaatattaaggtcttcaaaaaaaaatggtagtagacttaaattggaaattgattcgaaattaaaagaatctcgagaaatgttggaaaagtatcaaagattaagagaacagacgaaagacccggatgaattggaatgggtagatgttattcaatctcgtcatgtgtccgaaagggagttcaaattaaaacaaatagaattagagggtgaaatgaattctttagcatctattgtaatgtttctaagtttattggaatcgactttatttagcctgaccaagaaactcattgaatctgaaccatcacttcctgaaatgaaagatgttatgaatagaagtgataatggtatagttaaataccttaaatatttcgaaaaatacattgaaaagcaagaaaaccactttattgttgggacaaaaaagtatgaattaataaggttttggttgaatgtcagaaataatattgtacatagcaataatgcagtaaaaaaagagattttaagtgatgcaaatagattaaaaataagcatatctattaatagttattcaaataaatttcgctttaaagacattgatataatgtcagttgcagaactttgtggtggaacattggaagattgcattgaaaaaggcttgtataagtattttggtgtagaggacatctaataaaaaagaattatacaagttagtacgattaataaatgaatggtaaaaaaatcagtttttatttcgtttagaaagagtcgttcaatagttgagtgactctttctttcataatcactttatataattaatcaaaaccccactcacttatgataaggctcaccacgattaatccgaaaagcccgataaatctgctccactaaaatcagccgcatcaactgatgaggaaacgtcatcttcgagaatgacagcttgtcatctgcccgtttcatgacggcgtcgcttaggccgagtgagccgccgatgacgaaggtgattttgctttttccataagtcgccagcttatctattgtatcggccagttcttcggatgttttcatttttccttcgatggcgagggcgatgacgtgggtgtccgggctgattttggccaggatgcgttcgccttctttgtctttgacgtttttcatgtcttggtcgctcaggttttccggagctttttcgtccgggagttcgatgatgtcgatttttgcgtaggctgagagtcgttttttgtattcttcaatgccttgcttgaggtatttttcttttagttttccgattgtcacaatattgatattcacaggtcatccccactttagaaacaagttattcatatatattgtccacaattgtggatatcttctctgtattttgtgtaggatcattcgttccctactagatatgttgcagtgtccccacataattcacaggctgtggataaactgttagtatgttcgatttttctgatttcgggcggaagctcatgatcatctatgtacatgtccagcacggtttcaatatgttcttcacaagaataataagcggttttcatcgttacgtcctccggttttcttttgcacgcggcaattcttctcttttcaatataacctatttatacacatgttagtagtgcttcgggctgggttttatccacaattcggcaaatcacgcgcaaaaagagccggtgttttcagcatccggctctttacgtgttttctcttttttctaagcgaaggacgaacagaattcctaatagacacgccagcagtgtagagcaaacatcaatccagtccggctttccgccgttaaaaaaagagttggttattacggaaaccaggagaatggttacggtcaccgcggcaagctttttcttcatcggctccctcctaaattcctctatctctatgttcggtcggcttttctcttgttatatagccttatcataagggtcacaacgatatatacaatcataatcaatgccccgttgctcacatcagggtatccaatcaacatattcattatgacaaaaacaatggttatacaaatgacggacaacaataagaagatactgaatgatttcaaatgaccaccttctttcttgcagtaacgtttcattataaaaagcttaccaaaagcggcaagctcttttcaaatctgcatatttcaaccaaagaattgttcacaaatttctttagcacctgcttcgccaactccattttcaattgctaaacataagggcgagcacactactgcgccgacagcacctccgacagccatacaagcacctgcgcaagcaatactggatcccagccccagcatttttgtgactaaatcgttacaggactccaattttgattttgccggagatgcttttttgacagagttcaataaagcattattccccttgccttttaatccatcttgattaaaatcttcattaataatttctttatctccaactcttaatttgaaatttccttcttttttttctttgtcccattttcctataccctctacggataaaacgatttgctcagagtttaaattaatatacctctgcgcaaatgaatgattttgctgatcttcataatgaaccaatgcaatcttatgatctttattatttaaaacagtcacaaagacttctgttttatccatatccaaatcatctctgtctttgacgatattcaaagctttttgtctgtcttttttacttccttcagacttaatcgttttatcacagacagggcatgtgatttcatcttttattgtctttgtactaatagcttctgtcacacctgaaaaactgaacataaaaacaaaaataactactcccacaaaccatttgaaacgttttttcactatatatcctccttttattcagtctactactctatatcctcaaacgagtacaagtaaaccaataaaaggtttttttgtttatataatccaaagtttgtgttttcattatgatgactgcttttccttctcaaacccatccatcacctgcacatcatacagcttgagatggcttttcggcgtcacgatgttttttaagtttgggatggtcaggccgttcagctttttgcccgttttcaggtcgaaggattcgattttggcgggctttttgtagctgtacgtaaacagatacagctttccgttttgatgggtcagctccttgaagtcggctttcattcgtgatgcggggagcttgaaggcttttttgctttttccggtctcagggttgatacggtacacgtttccgaagccgtcaacgaaatagaagctgcgccgctccatgaaaaagctttttttgaagctgaacggcatggagtcatagatcgtctgttcgtcatttttataagcggcgatgtcatacgttttgatggcgccgctgtttttcatgactttcaccatttgatagatgtgatctgctttttcccctctgatgacaaagcagacggcgctgtcggcggcggcgagctgggattcgacagacgtgccttctttatacgtccatgtcgcgattgattttgtatggagcttctctttatcagcctgaatgtcttggacgtgatagcctttttcgtcatctgtcggcgtgagtgcgaaaagatgatctttaaaaaagcctgaagcgcggatatagtgcgggatgacgtcttgcttccacttgccgtcaatctggcggtacagctctgaacggtagctgccgccgctcttgtcgtagcccgaattatacagcgtgtaaaagcctttcgcccgttcgatatatcccgcgctgtctcccgtatgctggtacgctcttttatacgtgtgaaggccgtcctgaacggtatagattccttttttgtcctccagcagcacgctgccgtcatgcactttggcggatccgagctcaagccccttcatgtgataagaagagagccgtcctttttcatcggcgaagagggcgtagctttttccgccgccgaacgtgtcttggtcagccgccgtggagaaatacagcagcgcctctttatctttcagaaaatcagggtcatttaatgtgtctctcgcaacctccgcaggatcttccgtgcggaaatagaagaagcataagaccgctgcggcggcgatgatcactaaggatatccagatgatttttttcacgttgttctccttagtgaatggtcagaatcgtggttgtgtaggacgagcttgtgatgtcgcgcgggtatacgcctaagccgccattagagtcgatatcaatcccggcttttaagaggaatgccgaccacagcagttttgagcagtttttggcgccttcatggcccgtatttctgttattgacgaagttgaaggagtactcatcaccgactcttgatacagcccagtcagcggcggcttgtttttgggcgtcggtgactttcacggtctggacgattgaattgtcttcgacttctctgccgttataagcaatctggcggacgccgtctcccggcacggattcaacaattttatcagcggatgaatacatgccgacatgcccgtggttgtaataagcggtgtatgagttcgtgtaataaatattgccttttgtgcttttcggaagttttttggttcctgacgatccgcccatcgcagagagcccttctttggaagcgattacatttccctgcaccttgtctgccgtgatttcttgatgaaactgcttgagaattgcttctgttgaaacgtgtttctgtttggcaagctctttggcggattggagaacgtcttgaggagtcgtgccctgctgaaggtctgcgatttcttttgcgtagcgggctgtttctgtttctttcgcttttacattcataccggagaatgacagaaccatggtgaatgacagggcaaacggaaggatggctttgaacagctttttacacatattacttcgcctcttttctttgagtataatttttccacatttgtattatatgacggaattgcgataaaaaaatagataatttacagatttttaaaaattttataacaatatgtaaatcatatgcataaatcattttcaaatatcaggaaatccagttatcatacaagaaagggggaggacatatgaaggacagaacgatcggttcgatgcgggtttccgcaatggggttagggtgtatgggcatgtcggaatactacggcagccagagtgaggaagagtcgatttccaccctgcatcatgccgttcatctcggcgtgaatttgtttgatacggctgatcaatatggattgggtgcaaatgaagagcttgtcggcagagcactcgccccattcagaaaggagctttacctcgcgacgaaattcggttatgtccgaagcgaaaagggtgagtttatcgaaattaacggacggcccgattatgtaaaaaaagcgtgtgacgccagtctgaaacgccttgggacggattatatcgacctttactatctgcaccgggttgatccgcgggtgccgattgaagaaaccgtcggcgccatgaaggagctgatagacgaaggaaaggtgagatatatcggattgtcagaggcttccgcagaaacgatcagacgcgccgtccgtattcacccgattgccgcgcttcaatcagaatattctttatggagcagggaagcagaggagcatgtgctgcccgcctgccgtgagcttggcatttcatttgtgccttacagtccgctcggcagaggttttctttccggaaagatgatgtcgaccgatcagctggatgccgatgattacagaagaagaacgccgagattccagggagacaatttggcggtgaatatagggctcgtccaaaaacttaccgccattgcccgggaaatgaatatcactgctcctcagcttgcgctcgcatgggttctcgcaaatggcgatgatctcattccgattccgggtacaaaaaagaaacactacttggaagagaacctcgccgctctcgacattgtgcttcccgaggatgtgaaggcgcggttggatgagatgtttccgatcggcacggcggccggcgagcgttatccggaacacatgatgacattgttagatgaataacaaaagaggcccatcgtgcgggcctcttttcatgacaactttttgctcatgatgacatccgtctccagaaatccggtcttctcatacagcttccgcgccgtttcgttatgagcgaacacatggagagaaatcttgcggacacccaggtctttggctttgtcctccagccttgcgagcgcctcttttgcatagcctttgccgcggaaaggcggatgaaggccgaaatcataaataaatgcgtcctgctgcgggtggtccggatcggcgtgcagccacagccagccggcattttcctttccgtccaatgtcagcgtccataaatagtgatcggccgtctccaagccgtcaggaagcaggtcattaaacgccagctccgctaattccggcgcttcgtcaggcagccacgttcccgcttttaccttttcttcagcgtaatgcttggttgaatgagcgagataggactgaaattcttgtcctgtcatcggccgcagcgtgatagccattgaatcactccttacaaaacacggactgaaagcggtatcatgaagtattatccgaaggctccgttttccgccggttttatgatttgttcggcttgtgccgttgaaccagtttgcgcaaataatccaatcgaaatgagacttgccaaggctgctgagagtacaatgaatttacatgttttcattacgaatcccctccgttaatctcaaaatttggtcattggcatcaattgattcttgaaaatacttcgccgccagtttgtaattctcctgttttttaaaatgcgcagcggcctgatacgacaagtcggaaacgtcactccacagctctttccttcttaactcggcgaaagctgattcaagcgcttcttcattgcggtcaataaagacatgctgtaagatgcgcagcttttgggtgtatacgggctcgtttttttcttcagcggcattcagcgctttatgcagccaaaaccggccctcatccgcctgttcctgtttcaataacactctggccagcatgtacagactccgcaccgaatacgctgattgcaaatgctccttttgatcgagagccgtttcaaactcgatccgcgcctcctcaagcttttcctgtctttcatagcaaatacctgcgttaaagtgggcgagcgcctcaatatgcggatcacccgctttggcggcttgatgaaccgccgtctgcaggagctcttcggctttctgatagtgaaacaagtccattctgttacagccgatcaccattaaacactgtgcttctctgaccgcgtacatttcattggctttgtagatctccaacgctttttccgcgtggttcatcgcaaagtagttttggcggatttcatagtaggcaatcgccacttgataattaaactcggctctttcaatctcattcggtatgtgccggagcctgctttcagcaatccggtaaaaattaatggcgttcataaaccgtttacggtaaaactcgtgcattccggaaaagaaataataatagtattgaatcatctggtctgttttttctttatcggcgttcagctggatcgtttttaaaatgccgtctgttttctcatactcttccattaaaagcttatagcgggaatcaattaaattaaaataaaggagcaccgtttgattttgtgtcatattttgcagatccgtaagcagttgttctcttaacgcctcagccgattcggtgttgtgctttttgatttcctcataccagtcactgatttttttcgcaactgtttcgtgggccatcacttcagccatctgtcaggacacctccctttcccattttgtgtaataaatatatcatatttacaggttcaaaaagagggtggcagcccgctagtttcctcgtggcaacaaaaaaacctccgcaggtgcggaggcgcatattttataacagtttttttcctaacaaagattccaccagctcgaccgctgttttgccggttttgtttttgtgatcgaggatcgggttgacttcgacaaattcagctgaagtgatgatgtcggcatcatacagcatctccattgccaaatggctttcacggtagctgatgccgccgacgacaggtgtgcctacgccgggtgcgtcgctcggatcaaggccgtcgaggtcaaggctgagatgaacgccgtcacagtctgacaagtagtcaatggtttcttcaatgacctttgtcatgccgaggcggtcaatctcatgcatcgtatagaccttcatgcctgtttccttaatgtattcacgctcaccttcatcaagcgatctcgcgccgatgatgacgacgttctccggcttgattttcggggcatacccgcccaggttcaccagcgtgtcgtgcccgacgccgaggctgacggccagcggcattccgtgaatattgcctgacggcgatgtttccagcgtgtttaagtcgccgtgcgcgtcgtaccagatgacgccgagctgtttatagtgctttgccgttcctgtcagcgttccgatcgcgatgctgtgatcgccgcccaagacgagagggaaccgctcattctcaatgacgctgtccaccttttgggcaagctgctcgttccccgaaagcacggagttcagatttttcagctcttcatcatttttgagtttttcacgattgacggggatgtcgcctaagtcttccaccgcataccccatgtcagataaccgttcaatgagatgcgcgtagcggatggcgctcgggcccatgtccactccgcgtcgtgcttgtcctaaatccatcggcattccaataactgagatattcttgttcatccgtttttccacctcaacatgttgtatgttgtcctgtgcgggtttctcaaagatgacttggacacgaaaagatttaaagctctatctgtttttctgactgcttatgcttttttacatacagatgatagacgataacgcacaccgccatgaacgggatgccgcaataaagggcgagccgctgttctgaatcaaatgcgaggctgatcagaacaaccgtgtttaacgtcagcccgataataggcagcaccgggtacagcggtgttttaaacttcaggtcttccactttgccgccttcgcggatgtatttccgtctgaacatcagctgtgacagggaaatcgtaatccagccgacctgcgcgcttagtccggctaatgataagagaaacatataaacggtttccggcgctgccactttagacagcagtgacaggcaggcgacggccagcgtcacgatcagagcgttcatcggcaccccgcgtttatttgttttgccgagtgatttaaaggcttgtccttcgttcgccatggcatataagatacgcgtcgatgcaaacaggcctgagttggccactgagagcagcgcaattaagataacaaagttcataatatcggcggcatatggaataccgatttgttcaaacaccacgacaaacgggctttcgaccactcccgcctgcttccaaggaatcatgccggcaatgacgatgatggagagaacgaaaaagaccagcgttctccataccgtctgccggatagagcgcggaatcgttttctcgggattttcactttctcccgcggcaaccccgatcagctccgttccctggaacgcgaagtttacggtaatcatcgtaataagcatagccttaatgccgttcggaaacaatccatcctcataaaaatgagagaagaaaggagcctgctcgccgtgtttcatgtcaatcaggccgaacatggcggcgccgcccaaaataataaacagcagaatgactaaaattttaataccggaaaaccaaaattccgactcagcgaacgcttttgtggtaatggcgttcaaaagaaacatcagtccgacaaacacgaggcaccacacccatacgggaacatgcggaaaccagcggagcatcaattgtcccgcagataaaaactcaatggcgcatgtcaccgcccagccgagccagtacagccagccgaatgcgaaaccgaaagcggggctgatgaatttggttgcgtacgtctgaaacgaccctgatacgggaagggcaaccgcaagctcgcctaagcagagcattgtcaaaaacattataaaaccgccgaccagataagacagaaccgcgcccagcggtcccgcctggttaattgtaaatccggtactcaggaaaaacccggtgccgatcactccgcccaaagaaatcataaacaaatggcgtgatttcattgtgcgctgaagctgattctctttttgatttgtattcactattctgcaccccttcagcaacttgtattggaaccaagccggtgctttgaaaccgatttgctgtccaaagagcctctatttgtatatgaatgttatatgaaattcattttcgtacataaagatacattatactaaaatactgtcgccgcgcaaatagagtgtgctgaattttttatttgtaaattccatacaagccgagggaaagcattgccgcatcaaagttttacgcgttttgaagcacgtttgtgatcttttggaccgcccagtccaagtcttccttggaaatcattaacggcggtgcaaaacggatcacggtatcatgtgtttctttgcataaaagcccttcgcctttcagcttttcacagtacgggcgggccgcttctgtcagttcaacgccgataaacaggccgcgtccgcgcacgtcttttatgatcgggttatcaattttctcaagctcttctttaaaataacggccaagctgaagggaacgctctgccagcccttcttcctcaaggacttcaagagatgcgagcgataccgcgcaagcgagcgggtttccgccgaatgtcgagccgtgggaacccgggttaaacacgccgagaatgtcacggttcgccgcgatgcacgaaatcgggaagacgcccccgccgagcgctttgcctaagatgaacatatccggtacgatattttcccagtcaaccgcgaatgttttccctgtgcggccgagtcccgtctgaatttcatcagcgatcagaagcacattttcttccttacaaatggcggccgcttcttgtaaaaatccttccggcggaatgacgatgcccgcttctccctgaatcggttcgaataagaaagcggctgtgttcggcgtgatcgccctgcgcagcgcttctgcgtctccgtatggaattaattttatacccggaagcataggtccgaaaccgcgtttatactcatcttctgaagaaagggataccgcaagcatcgttctgccgtggaagttgccgatacacgcaatgatttccgcctgattatccgctactcctttgacctcatatgcccagcgtctcgccgctttgacagcggattcaacagcttccgcccccgtattcatcggcagaatcatatcttttccggtcagcttggctgttttctcataaaacggaccgagctgatcattatggaacgcgcgtgacgtcagagtgattttatccgcctgatccttcagcgcctgaatgatcttcggatgtctgtgcccctggttcaccgcagaataagcactcagcatatccatatattgattaccttcagggtcttttacccaaacaccctgcgcttcggaaataacaatcggcagaggatgatagttgttcgcgccgtaatgtgaagtttggctgataatttcttgagattttgtgaaagctgacataatctgattcccccttgttttgtaatcattcaacattagatcttgctttccctttttataaagcaagttccgtgccaattcgaaaaaacgggatgtttcgccagcattctttcttttcccgcaaaattttccggcagtttgcgtgcaaacttcagccaagcgcaaaatttttttgcgtttcccgctgacaaaataggagcaatccaattagattgctcctactcaacagttatttattcaattgtctctgatatacaatgtaagaatatagtaaagataatatgatacagccgattgcagccatgaaaatgactgacactctatacaccggcggcaaaaaagctgcaagcatcatgagcatgcccgctaagacaaaaagtttcgaactgaccctgtgtgtatccttccaaactctttcactgctcagcgtccaaggtgttcttatccctaaaaagaaattaggcttaacgatctgaatgaagtttccaaacaccatgaaaatgactcccactataaagtttcctaaataagatatagggagatcatatcccaggccggtcaagatggtaatcagattaatgacaaacagaaccgcaaacattgtattaaagatagccatatatggccggataaacgttttgtagttatttttaggatcaatcttagggatgataaccattaaaatatatagaataatcatgatgccaataagcatcatcatcgcattagctttcgtttggtaatcatttgcacttccgtttaatccccagtgtgtcgccaaattgtccggtaaagatgaatatgtgcaaacccatgtgaaaacagttaaaactatgattcctgccgaaaagagatattttttcatgattccccgcctttcttattatcatgttctgaatcagtcagagaaaagaaccagcctataagatcctgtaatacagtggtatttaatgaatacataataaattggcctttcctctcatcgtgaaccaaatcagtatttttcaatatggtaaggtgatgagaaatactgggttttgacatgtcgaagtgttccgcaatttcaccagctgtcatgtcttgtttctttaataagtccaaaattcttctccttgtaggatcggccagtgctttaaaagctttattcaaaaactttccccctctcacgcatacatgatttagatatttaagtatatatctaaatatcaaccattttcctaaaaaagtcaatggttttattacctcaatttccatttatttttaaacattgtccaagcgcaaaaattttttgcgtttcccgttcgatttattttaaaataatgaatgttaagacgattgagagggggaattgacctgcacacaaccagcgaattttacacactcgtgttacaaagcattctggaagagattgatgtcgggctgcatgtggtggacgaaaaaggcagcaccgtcatttacaataagaaaatgatgcagattgaagatatggatgaacgggacgtcctgcataaaaacctgactgatgtatttatgttttccaatcagcaggacagcacgctcgttcaggcccttcaagaaggcaagacgattaaaaacgtgaagcaaagctatttcaataacaaaggccaggaaatcacgacgatcaaccacaccttcccgattgtgcaaaacggcgagatcaagggagccgtggaaatcgccaaggacgtcaccaagctcgaacggctgatcagggagaacatgcacaggaaagaacagaacagctacacgtttgacagtattctcggcaacagcccggtcattcgggaagtcatcgaaaacgcgaaacgggcaacccgcacatcatcatcggtgcttttggccggcgagacgggaacgggcaaggaactgttcgcccaaagcattcacaacggcagccagcgctcaggcgccccgttcatctcacaaaactgcgccgccctgccggatagcctggtcgaaagtattttattcggcacgaaaaaaggcgcctttaccggagccatcgaccagcccggcttatttgagcaggcgcagggaggcaccctgctcctcgatgagatcaactcgctcaatctcagcctgcaggcaaaactgctccgcgcccttcaggaaaagaaaatcaggcgcatcggatcagcgcaggacaaaccgattgacgtccgcatcatcgccacgatgaatgaagacccgatcaccgccatttcggaagagcggctgcgcaaagatttatactaccgcttaagcgttgtcacgctgatcattcccccgctccgggagcgcaaggaggatattctgcctctggccgaagtctttatccagaaaaacaatcacctgttccaaatgcatgtcgattcgatcagtgacgatgtgcagcgattcttcttggaatatgactggccgggcaacatccgcgagcttgaacatatgattgaaggcgccatgaactttatgacggatgaaacgacgattacggcggcccacctgccttaccaataccggatgaaaatcaaaccggctgacacggaaaccaaagccgccgcaagcacccagcccggcaccgatttaaaagacaaaatggaaaacttcgaaaaatacatgatcgaaaaaaccctgagaaaacacggcaataacatatccaaaacggcaaacgagctcggaatcagcagacagagcctgcaataccgcctgaaaaaattcggtctggaccggatgaaataaatccatacaaaaaaaggctgagttgctcctcagcctttcgtttatatctgattggcaagccgctctccggtaaaccaaaagttctcactcactgccaatgtatgttccgtattctcgacttgatgccaccaatggcgcggcgcgtaaatgatttctcccgccttttgtctgaagcggatcggagacgccttttgcaccagcggtttttgctcaatgtctttttcatcaaagacattgatatttccttcgtacaaatacggagagtcgtccggatgatagaagatccattccttctccccgaaaatgacgccgttccacgcgtgcgtgttgttaaaatcctgatgcagcggtgtgcctgtctgcttagaaccgagaaagaaccatttccagtctcgtcccgtttcttcatccgctctcaatgtgtcttttgtaaaatactcgggtgcggaatagacaaggtctaagtcattttggttcagctgcgtaaaattccagtcacagtaccatttgtcatcattctgatcaatgtactcgatatagttggaaagctttacttgtttaaaggttttgaccccttcgatatctgatttccggatggtgaccattctgtccccatagtgttcatcaatgtattcaagcgtccacggcctgcattcccagtgatccattgcccccgtcaaaataaaaggttttttatcagcatactcgcttacaaaaagatcgtacgataactcattgattgtcagtctgtcaatggtcatatccattccccttttattcggcaatctgccgttttttttgtttggcgtaactgtatggacctgaaaagatggtgacgttttgattctcaagccagaaaatcttgttgaacttctccagcaggtttctgtcatgagaaacgcagatgatagtgccttgaaactgcatcagactgttttcgagaatttcctgagattcaatatccaagtggttggtcggctcatccaggatcaggacattcagctttttttccattaagatggacagcttcagcctgattctctcaccgcccgacaggacggaaagttttttaaagaccgacgacccgtaaaatccgtacttggccagcatattccgggccatgccctcttcagtcagcagattttctttaaaaaattgcagaatcgtctgactcgaatctcctacatggctcttttgatcaatgtagcctattttaagattttctcccactttaatggtgccgtccgacagttctctttccccgatgatacagcggatcagcgttgttttgccgacgccgtttctgccgacgatgccgattctgtctttatgctttatgcgcagattcacattttgatataaaagggaagatccgttggtcacctttccgttttcaatgaacacaatatcttttgaaccggcgcccgcttcctgaaatgcgttttttaatttttgctccgtccggaccggcttattgatcagctcgatccttttcagcgccttttccatattattcgcgcgtctgtgcaggccgacagacggcggatttgagcggttggcccattctctcagctgggcgatggattccttcatcttctgtatttttctctgctgttcttcatatttctcaaactgggcgatgatgaattcttcccgctttttcaagtattcgctgaatccgtaaggccaaatcttcacctcggtatcgtcaatctcgagcaccttcatcgccgtttggtcggcaaacgttttatcgtgggtcgtaaacagaatggttttgttcgattttttaataaacccttcaagccactcaatcgcatggacatccaaatggttggtcggctcgtccagcagtataacgtcgtcgttgcggattaaaatttcggcaaggccggcttttgttttttcgccgccgctcagctttgaaaacggctgatcctttaattcgctgaggctgagcccgttgcatacctcgtcaatcatcgcatgcatctggtagccgttgttccgctcaaatgtttccgtgtattgactgtacttttctaataaagcagtcagctcatcatcactcatcggttccgaaagcttcagctcaatggccttcatttccttctggatcgccgctagagcttcaaacgatttttccagatattgatacaacgtcagatcctcattgggatcagcgatctgcttcagcaaaccgaccttcgcccctttgttgatcgcaatcgttccttcatctgcctcaagctctccggaaagcaccctgaacagcgtgcttttgccggaaccgttcggcccggccacaagcactttttcgccttcattgatgaaaaaagaaacttgtttgaaaatggtatctcccgctaaatttaccgtaagattatgaatattcagcaactcacatcatccctttgtcattctggttcaaagctcgactttattctggatggcgacgctcgctttcagtttgtaaaagctgagcatcataaacagcgacaataagatggataataacccgattgcggtcagcagcaaagctgaatcaaaatagtccgttaagaatccgataaacggaaaggcaatgaacatgaagagcgaggtcatcaaactgataatggacagcagcgtggctctcgttctggacggaatctcattattcaccacctgactggatacgggttctatcacatcatagagcgcgttaatgacgacaaaagctgcaatcgtcacgtacagactgcccgaaggtataaacagataggccgccccgatgatgcagaatgtcagcagaagcacgcgcctcggcgtgaatttttccgccggcttggaagaaaagatggagcacagcgcctgcaagatggacagtcccgcaaaaataatggatatattgcgcacggacagcccttcctgacttaacaaatcttgtccgtacatataaaaaaccgatgtaatcgcaaagaaaacggagagtgacagcaccagatatttaaaggctttgttcagcctgaagaaatctttgacttcttttaagatgtcaccgaccgtctgcgtttcgtgttcactgttttcaaatttgatttccgtcagctgtgtaatgaccgccattgcaatcagctgagtgacaatcccggcgataaacacatacgaccatgatatttcctgcaagtagccgccgatgcccatggcgatcgcaagaccgagtatgacaagtccgttataatttccgatggatttgccgtaccatttttctttcccttgttctttcagtgaatcaaacaaaaaggcatgatccgttcctgatataaacgtcagcccgataccgtatataatatgggcgatgaagagggcgatgaagttgtggaagctcaggaacatcaccaaatagacaatgaccataaaatggccgagcaagagcgatttttttctcccgattctgtccgagatgacgccgctcggcacttccgccagaaacatcgccaaattcaggaccgattgcaggatgcccacaagaaataatgaataattcatgcttgttaaatataaaatccaaattccccgttcgaaaaagaagtttccgaaaaaaccggagaagtaaagcaaatttcgattccgcaaatgaatacccctttccagctatctgcatttaacatcatgaacagaaaggagcccgtcagtctttacactaaaaccctctatacatggatcttgcagatacagacttttcccaaaacaaattgggcaataatgagttgtattctcgaataacccaaaaagttccttctttttttcagatcctacggcatcaatgatcgtttttttcttccctggatcgctgatgtcgcggatgaaatatttgatatagctcagctcatgcatgtaagccggcaggaacaaatggagctcaatatcaaaccggcttttatccatatggtaataatcattgaaatgactgacgcgggagacggacacgtccgctccggcccgccgaaacaaatcagccagcctttcaatgatctctccgttgggataataatcggcataaacgattcggatcggttcttctcttgtcaaaaggggcggatctttctgcggtgtcctcccgatttcccatataccgatcagtgaatcagtcggtgtgatgatatgccccaaatcgccggccagcttttgtttattaaaataatgctgaatgaaagttctcagcatgtcgtcctttaccttgaaggtaaataacatcggcaaatgattttctttaaaatcagcatactgccgatacctcatgtttgaatgatgaaactgggtgtggcaggtcacgtccgtttgattcgcttcgtacagcccgatgcttttttccagatcatcattcaaaataaattggatggtctgaaccgtgcggtgatccgcgggcgtcattttatattgcggattccgctcaaattccagccccttctcaaacgtgcgcttgaatcggtacgggccgttttccggcacatcgcccccggcggtccccggaatcagaaagctgctctgcaaaacggcttctatttcatcagacggctcgtccaaggtgacttcaaagcgtttttcgcctgttacgttcaccccgagctgatcggatgagacgaggccttttacatacggaacggcctgttttatgttcaggaaactgccgagatgggggctttgattttctttcgtcagatgatagatgatcgtttgaaccacaccctcggcgtcacctaaatagtccgggtgaatgtccacctgacaggtgcggggatctttgcggatgatccggcagttatagccgtcctgcagactttcatacataatgctgcaaatcatcttgcttgtgtaatcctgcgtatctaatgggttcaagcgtatcgggcttgtgtcgatttctattttcagagggtcgcccggttttctcgccgtacgatgcatcgtcttcataaagcgctttccttttgagaaagtttcgtttctgtaatatgaaggccgtcaaagtccaggccgatgcgggtattcagggatttcgggcttccgcctgcaaggtatgtgataatgtcatgagacataaacgaggatataataccgtttgtcgctcctaaggaacctttgatcggttcatcggggtaacagttcagaagtccggccggcaagtttttttcataggtgacgccggattgataggattcaggcgtgagcagaggcccccattggccgctgaagctgccgacacccccggtcataaatgcaatattccgctccttacaataccggtaaacccattcagaaatgttatggggtttgtcagcggcatttatgacgatatcaatttcgtacggatctaacacacgcaggtcctgcggctgtgtaatttcctgatggtaaagtgctgcgtccgcatggggattgatacccgtaatataatctttgcattctgagatctttaatttgcctacagaagattgattatagacgaattgtctgttcaggttatgtactgatacggcatcgaaatcaatgagaataaaatgctgcatgcccgccgccaaaagattttgaagaatgatcgttccgacgccccccagacccacgatcgctgccctgctgccgtctaatctcttttggatcagattggggttttggttgtatttctcaaaatggtacagctgcttttcagtgatgcggccttcacggccgttttgccatggctctattaaagcatccaatttcattaatgcatcgaaaaaatggtttcccgcttcctctcccagaagatcagaaagctcttgtttttcacagccgatgatcagccgttcaaccgcctctttgatctcactcgtatgcgcaagcttaatcgcctttcgattttgaatgataatatgcgccgtgtaggtcagcacctgcacgctgtctttaaacttccagcgcttacagtccgttgacatcatgacataccccctgaaagataataactccccaatgaggggagtcacggctttactagcagcgatgcaccaagcttgctgtttctgtatcaagatcaagttcttcaatcttcatcagtacacaccccctttaccaataactagatattatcatcaatattggaaaaggacaagtaattttttgaaaatttagaatttatatataaattgtgatatttcttccttctttacggtttatcccggcagccggatgatgaacacggagccttttccctgctcacttttcacttcaattgttccgttatggctgtcgataatggtttttgtaatggcaagacccagccccgcgccgccggattgacgggatcgggaggtttccgccctgtaaaaacggtcaaacaaatgaggcacatgctccggagcgattcccgttccgttatccgcaatcataagcatgattcctccgtctttctgcagggagacggtgatgacacccgtgtcttcatccgtatgctgcaccgcattgtaaaagaggttgagaatggcctgcttcattttgtctttgtcaaaaacggcttctatcttttgatcgacaaagaactcgagcttccggtttctcgcgagcagcttcagctgagcctccatttccaaaatgacgtctcccaatgcgccttttttcatttcaaagctcggcacccggtcaatcttcgcgagaaacaaaagatcctctatcagcttattcgccctggcggattccgcgtacatgctttgaagcgctttttctttctgctccggcttctccgccgctcctcgcattaacatttcgatacagccgtgaatggaggtaagcggcgttctcagctcatgcgatgcgtctgatacaaactgccggattcgttccttctcttctttttccgcctgaaaagaggtttcaatccgttccagcatctgattgatggagatgcccagcgactcaatttctgcctgccttttatcaatcggcagccgcttatcgagactgccggcatgaatgtcacccatcaaacgcacaatgcgggacagcggcttgagtgtgagccggatcaccggcaaaaaaacaaacaggccgatgaccaaagcggcaaaggaaagcaccgcgaaaatgctgatctggcggaaaagcgaatcattcagaggctgggtcagcgtgctcatctgcacaactcccgcctgccttccgtcaacggaaatcgcctgaaacacgacgatgatttcctcacccgccttattgtgagccacctgatagtgaagcgccattgtatctgtcagcgcatcccggtacacttttttcgggaaagaaggagcggcccccgcgttcgggtcttctgataaaacagacatcttgtatgattgattgataaaagcaaccgtcaccccggggtaaatcaaattcggatgagccggtgtttcggaacgggcaagggatttgattgacctccatacgctttgatccattgaattgatatcactctgaatgctgatcgcctgattttcatacatcgtccgtgtcataaacatgtactgagtgccgccgatgaaacataacagcaaagccaaaatcgccagtgacctgaacaggagctggaatcgcagggttctgtacagccgtttcatgccagatccaccctgtacccggcgccccgaaccgtgcgaatcaccttgtgttctttgtccttcagcttttcgcgcaaagaacgggtgtacacctcgacgatattgtcttccccgaggaccgttccgtaatgaagccccatcgttaaagaatcaatgagtgcagactcgccgtctgcactcagcttgatgcctttcaacttttccatgatgcagtctctccttagatgtatcagcctgtgtttatttttttcgcttccccttctattattcgcttttatctgaaacaaaacggaatctaagctgaattggtgaaaggaaacgctgaaaacggagccatctgcaagtaaaaatcattatctacgcttcaattcagcagcaccagttctaggttcacgtctcctttttctacatatacccatttttaactgaacgtgttgtgacccgcgttcagttcttttttatggcttctgaaaaaaggcataaaaaaagcgccctgaaaaaggacgtttaatatgacatgtttcatgttcttaaattctgcattctaaaataattcttccttcacattcaccttcaatttcattcaatacgatgatcacatcagccgttttcatgtgtttcacctcccgttttcacaatagtataatattaacaaataaatcaataaaaaacagcccggatgtccgggctgttttttatttctgtaatcgatccgcttctgtcagtttgacttccgctgtttttttctttcccgaacggtagaacgtgatgttcacacggtcgccgatctttttgcgatacaggcgctcacggagatcaacaacgtcattgaccttatgtccgtcgaacccggtaatcacgtcgagctttttcaaacccgcttttccggccggtgaaaacgcgtcgacacccataatgaccgccccggttttaacgcctttcggaagtttcagcgtctggctccaatggtagctcgcaatatccgttaaggatttcatctcaataccgaggaaaggccgtctgacttctccgtatttttctaaatcctgaataacgggaatgacaagctttgacgggatggacaggccgatgccttcaacggcggattcagcgatcttcattgagttgatgccgaccaccttgcccgatatatccatcaaagcgccgccgctgttgccggggttaatcgcggcatcggtctgcagcacttccgcattccaatccggctgtccgtcgccgtttgagtcaacgggcaccgccctttccgtgcctgaaatgatcccctgtgtcactgatcccgcaaattcaagcccgagcggatttccgatcgcaatgaccggttctccgactttgacctgatcagaattgccaaactgggcggccgatttgattttatcagacttcaccttcagcacggcgagatccatcaaacggtcgctcccgatcagctcagcaggcacgcgtgagccatccttcaggctgatctcaatctcagtcgcaccttcaatgacatggtgattggttacgatataggaagtgtttccgttctttttgtaaatgacgcccgacccgcttcccgcttcgccgccctctccccaaatatcggtcttttggatattgagaacaccgactaccgaatctgatacacggctgaccatattcgtgacagcgtcattgacatttacgttgactgttttcacctgttcgctgccgagacgctggctggtgcttttgctgctttctccatggtctccgcctgtccagtacggcagcaggaaagccatgagcgcggccccgacgatgacaccgatcagacttgatagaaagtaccctctcttgctgcggcggggctgttcggaggcgtactgttcatcatcgcgattataatccaccctatctcaaatcctttcaagagtactcgatttgcttatagtgtgggtcagatcgcggattaataatcatgattcatttggaaaaattacacggcgcacagcggcgtcgggattttcggatcggtatcaaataactgaaacgtttccccggcgacaaatcctttcgcagccaatgtctgctgcacggacattctcgccagttccttcatattgttgtcttggctcagatgcgccaaatagatgcgcgatgtgccgtcgccgatgacatcagtcatggcgagcgccgcgtcttcattggagacgtggccgacatcgcttaaaatccgccgcttaatgctccatgggtatctgcccatttgcagcatgccgacatcatggttgctttcaaacacaaacacattggccgaacggataatgcctttcattctgtcgctcacatacccggtgtccgtcatcagcgcgagctttctgccttggtagtggaaaacataaaacatcggctcggccgcgtcatgggagacgccgaatgactcaacatcaagcccgccgaaggattttacgctttccatcgggaacaaaaacttttgtccggtatccagcttgccgatctgattctccatcgctttccacgtcttttcattggcgtagacgggaagtccgtactttctcgcaatgacgccgagccctttaatatggtcgctgtgctcgtgagtgacaaagatgccgtcgacgtcgtctatcttgcggccgattttctccatcagcccgtccatcgctttaccgctcaggccggcatccaccagaaaagagtgctcatctgtctccagataaaacgcgtttccggtactcccgctcgcaagcacgctaaattgcaagcccattgtgtctcactccattatttattttgattgttatcaatgactgtgctttccaatgcattcacagtgtacgtttgctgtgtctttttcttcgtcccttttgacttatcttcaattgtaattctccataccggcgccagcacctgcgtacttgtcagcggatattgggcaatatagccgaacttaacgcttttaacggcgcaattcgcttttaagtaattttgagaatacaataattcgaccgcatcaagctcaggaatcaggctctccgtctggattcgcttgaatgactccagcatggtctgctcgtaagatacgacctcgtttttatcgttcagatgcagaatcacctgtccgatcgcatccgtggacgagtcaaaatcctgataaataaactggccgtcatacatctggtaaaaagtgatctgttttttatccttgtcgactttccacagtttatatttttcaccgccggttattttagagctgacgagcgattccgcatcctcctgcggtttttgcttcgataaaccgaccggatcggtaaatttcattttcagtgtggtaaccttgtgatcatccgccggcatctccattaaaggcttttgatctttcaaagcatcaatatcttcggcggtaaataccttttggcccgccgtcagccggtagcccgtcgcggaatcagaagacaggttgccgaaagtgatatgatccatctccatgtctttttccacatttgaatttttaatcacttcgtattcactgctcgagcgtttttcaaaaaactgatagccgagaaaaatatcgaggatgaggaaggcaatgatgaagatcgtttttgtcttattccactccattatcgtcctcctccttccccagcagatctttcgtaatcgggacgatcttcccgttgattttcatactccagacgggttccagttcaacgagatcattcgttgatgaagagaccatttgataggacaggaagatctggtcgattttattcacgtcgtatttatcctgctgctccagcagagacacaacctcattgccgttcatcatttttacgtcttttgttttaatcggattcggcccgagaacatagttcggccgcttgtagctgagaacctcgtcattggcccattgcagggtcaaaacaggtccggatccgaaaggcttagacgtgctgttgatcacaggcatttggtctttaaacatgtagaaactcagctgctggttatcactcacattgaaaaattgataatgatccgtccagcttcccgtatcctctaaatatttatagcttttcttaatcagctcccctgtttgataagaagcgctttgtgccaggttccgatgctggaattgaatctgccgctgtgtcgaattgatttccagacggctgattccgtcagtcagcacattccgattgtaattcgggtcttctctgaccgtgctcggatcattaaaaagcgtctgcttaaacaggttcgtcttaatggtttcagtgataaattctttttccttcatattaaaccgcgcattcggcatgagaaattctttgctttttccgaccgaatagaggtggtataacggcatactcgactttttgctgtacagctcattcatcagattgcggtaattcgccgattccacagtcacttccaaaatcagctgcttgctgtatgagaccatgtaaatcttcttatttgtcttattctcattaaacggaatgacaatatggtcaaatgagctgtattccattgacggattcgaccatttaaacatcgattggaaaaaatcaatcggaatggtgtcattgaattgcagatcgagctttgccgaattgccgtttctgccgtaaagccaatttttaaaaccgagcttgtcgtattgatcggaaatatccttcatcccttttacttcccattgcggcaaatccgcccacaggtcattaaagagcgtctcatcatccactttataatgagagccgtttgtatgaataaacatatcccgaggttttaccgtttgcgacactttttggctcgttttatcaattttatgcttttcccggacagtcgatttggttgaggccgtgccttctgaaaaattgggctggaatgtccaaattccccatgttaaaacaagactaatgacgaccagcactgacagtatgactgtttttatattttcacgcctcatcccaatcatcctcttgctcttctttatatggaagagtaaatgtaatcttcgttcctttgccttctacactgtcggcccaaatgtctccgccgtgcgcctgaaccatctcttttgcaatcgcaaggccgagcccggtgccgccgagttttctcgtgcgcgctttatccactctgtagaaacggtcaaaaactttttccacatcttttttcggaatgccgataccttcatcttttacgctgatataaagcagctcttctttctcattcacatcgactgagaaagtgacatgtccgccttccggtgagtatttcagtgcgttagaaatgatattatcgagaacctgcgtcactttatcctgatcaatctccacgtacagatttctgtccggaagctcgcggataaattcgacatgctgttctttcgtcatttcaaaacgatcgataatcagtgacataaagcggatcatatgaatccactcccgattaaactgataatctttgctgtcgaatttagaaagctgaagcaggtcgttcaccaatctgatcatgcgctcagtctcattttgggtcaccattaggaaacgcggagcgatatctttgttttcccacgcgccttccgcaagcgcctctaaatagcttcgcatggtcgtcagcggtgtcctcagctcatgagacacgttggcaacgaactctctgcgttcccgatcgagtttttcctgttcggtgacatcataaagaaccgcgattaaaccgtcgatttttccgtgctctctctgaataacggaaaaattcacccgcagtacagtcgtttcatcgtcacgttcgatctccagcagcattgaatcctgctgttctactaaatcctcaaatgtaaagttctcttttatgcctaataaagacgtaatcggcatctctaaagccgtttcacgtgaaacattcagcagctcaagcgcagggctgtttaaaagaataatagctccattgcgattcgttgcgatgacgccgtccgtcatatacgcgataacggaagaaagctttcttctctccccttccgtcatggcttgggcatcttcaagctctctcgtcagatggttgaacgtcgttgcgagctgaccgatttcatcatgcccgtatttccgcacctttctggagaaattcccttttgccagttccatcgcctgcttacgcatatctgacagcggatgggtaatggtgcgggcgagaaatataccgagaagagccgtcagaacaagggctaagcctgttcctgaagcaagaatcgagttgacggttttcatctggttaaaggtatcttccatactggccacgacatatatcgcgccgacaacttcctgattctctgtgacgacaggttttgctgaaatcagcactctgtttttacttttaggatcataatatttttttgaataggcctgttttgttgagaaaatccgtttaaaaatcgggtcagtcgtctgtttccccgctatttcctcgccataaggcctcgaagaaccgacgacctcatagcttttatcaacaaatgtaatctcccgtatttcattgtttttcgtaaaatcattcaaaatccgtttgacgtcatctttaatgacggtgctgtcattatctcctttatattcctgctcaatataataggatagattgtcaatccgctgatttaacgataattcataggacttgagaagagaattctccacctgtttcacaaagtacacaccgataatctgcatggcgatgataatgagaagcacatagatcagcgtgatcttaaactgaatcgaccgaaaaaaaccaaccttattcatcgccggttagtcctgttcagggtttctcaagtaataaccgacaccccgtcttgtgacgatccagttcggatggctcggattatcctcgattttctcacggagacggcgcactgttacatccaccgttctcacatcaccgaaatagtcatagccccacacagtctgcagcagatgctcacgcgtcataacctgtccgatatgtttggctaagtaatgaagcaattcaaactcacgatgagtcagctcgatcgtttcttctctttttgatacgacataagcgtcagggaagatgacgagagaaccgatatgaatgtcattagaagcggattcttcctcagccggcgcaaccgtaagctggcggcgcaggttcgctttgacgcgggccagaagctcacgcgtgctgaaaggcttcgtgacatagtcatccgctccgatttcaagcccgatgaccttgtcaatctccgagtcttttgccgtcagcataataatcggcatatcatattttttccggacttcccggcacacttcaactccgtctttattcggaagcataatatctaaaagaattaaatcaggctgaagctcctccaccatttccacggcttcgtttccgtcgtacgcacaatgcacgtcatagccttcttttcttaaattaaactctaatatatctgcaatcggtttttcatcatcgactacaaggattttcttatccatcatcttgattttcctcctgccagaatgacttcatttcatctattgatgtttcatgatgatcacaattcggatcgtgaaaaacgttccccgtctattataacggtttcaggtcaaaagataaaaaaattaaagagaacagcgcaaaaacgtattgaactgccatccttttgtcatgttttttattttcttttaaaaaataatatttttttgaaacctcacgaaaaaaaacgccgtctagtgtttgacgtcttcttctgggccggctgaaaagccggctctccctttttttataacaaaagaaaaaacgcacctactattgcagatgcgtttgggtaagtggctcgggacggaatcgaaccgccgacacacggattttcagtccgttgctctaccaactgagctaccgagccagatgtttcttttctatactataaagtaaagtaaaatggcggtccggacgggactcgaacccgcgacctcctgcgtgacaggcaggcattctaaccaactgaactaccggaccttacagtaatttgtccggagagccgtatcgtggcggccctccgaggacaaataaggagttagcaataacgctaaagtaaatcaatgacccgtacgggattcgaacccgtgttaccgccgtgaaagggcggtgtcttaaccgcttgaccaacgggccataaaaagtggtgagccatgaaggactcgaaccttcgaccctctgattaaaagtcagatgctctaccaactgagctaatggctcctgatgtgtcggattatgtatcatagagcattcagacaaaagctttcttgcagtactctattgaagctgttccgtaacaacgagatttataatatcatagaacattcgaaagtggcaactacttttttgaaaaaaatctattatttttttcctacataaaaaaacaagcctccgtgaccggaggcttgtttgctgcaaattcttagttagcgcggtatacactgcggatgacgttcgtttgtgaacggtcgggaccgacagagaaaatagaaagcggaatacctgtcagctgagatacgcgttccagataatggcgcgcattttcaggaagatcgcttaatgtttttgcgcctgtgatatcttccgtccagccaggcatttcttcatataccggttcacactctgcgagagctttcagacttgccgggaattcttcaatcacttcacctttgtagcggtaagcgacacagattttcaatgtttcaatgccagtcagcacatcgattgagttcagagaaagatctgtgattccgctgacgcggcgggcgtggcggacaacaacgctgtcaaaccagccgacacggcgcggacggcctgtcgttgtgccgtattcgcgtccgacttcacggatttgatccccgatttcatctttcagctcagtcgggaaaggaccgtcaccgacacgggttgtgtacgctttagatacaccgacgacgtgctggatttttgtcgggcctacgcctgaaccgatcgtcacccctccggcgaccgggttggatgaagtgacaaacgggtatgtcccttggtcaatatcaagcataaccccttgagcgccttcaaataaaacgcggcggccttcatccagcgcgtcatttaagacgacggatgtatcgcatacatactttttaatctgctggccgtattcataatactcatccagaatatcttcaattttgaagccttctgtttcatacattttttcaagcagacggtttttctcttcaaggttccgttcaagcttttctgcaaacacgtcacgatctaacaggtctgcgatccggatgccgatccgcgccgctttgtccatataagcaggtccgatgccttttttcgttgtgccgatcttgttggcccctttgcgttcttcctctacttcatccagtttcagatggtatggaagaatgacatgggctctgttgctgattctcaagttatccgtgctcacattgcgttcatgaagatacgcaagctccgttatgagcgctttcggatcaacaaccattccgttcccgatgacacacgctttttctttataaaaaattcctgatgggattaaatgaagcttgtacgtgacgccatcaaacttgatggtatgtcctgcattgtttccgccttgataacgtgcgatcacttctgcattttctgataggaaatctgtaattttaccttttccttcatcgccccactgcgtacctactacgactactgaagacatatatccgtgcacctccgttaacctttcaaaacgatatctcattcaaacaaattaagtgtatcagtgccgaaacagaaagtcaatcgtaaaaccgaacatttaaatcttatcaatctatatttgttcgccttaaacatgattaaaagcgttttctctttcatttgctatctattactcccgaaactttcatgctttaacaagaaaaagaacccgtaatcagggttcttcagacagtcatttatatgccgcttgtattcatcaggacgacccgccagccgtcaggatcttcgatggtcacgcctttttcttcccagtacgggttttcgggtgctttctcctcatatcccatctgctttaatttcgtgctgatgcggatgacctcctgctgatcctggatgtaaaagacaagcaggctgtcgccgtgcggaacgggcgccggctgagacgcgccggtttcttcggtgaattctaagtgatattgcgtatggggcaggccgaacatgacgccgctgtagccctcatgtccggaaaagctgccgaccctcttcagcccgaggccctcttcataaaacctgatgatttctttgagctgtccggtcggccgggcaatccggatttgcgccgcttgaaattgcggaaattcaattgtcatcatcattcctcccttaatgccattatataaaagcgctttctttttttcgtctgccgaacggacggcattctttcattctttcggatgaaaaaaagcctcaagacattgcttgaggctttacgcacctgccggaacaccgccgtcatcaaagcgcctttccaggtttacgaacttattgtattctttcacaaaagccagtgagacggtgcccaccgggccgttacgctgtttggcgataatgatctcgatgatgtttttgttttcggattctttatcatagtaatcatcacgatacaggaaggcgacgatgtcggcatcctgctcaatacttcccgactcacggatatctgacatcatcggacgtttatcctgccgctgctcaacaccccgggagagctgagacagggcgatgaccgggacttcaagctcccgtgccagcgcttttagcgcccgtgaaatttccgatacctcttgctggcggttatcgctcgaacggccgcttccctgaatgagctgcaggtagtcaattaaaatcatgcccaatccgttttcctgcttcagcctgcggcattttgaacggatttcgctgacgcggatgccgggggtgtcatctataaagataccgctgtttgacagacttcccatcgccatcgtcagcttgccccaatcttcttccgtcagatttcccgttctgagattttgggcattaatattcccttcagcgcagagcatacgcatgacaagctgctcggcacccatctcaagactgaatatcgcgacgctctcatccgttttggtggccacgttttgcgcaatatttaaggcgaatgccgttttccccacagacggacgggccgcgacaatgatcaaatcattccgctgaaaacccgccgtcatccggtcaagctcaataaaaccagtcggaatcccggtaatatcgcctttccggttgtgaagctgctcaatgttgtcgtatgtttgcacaagcacgtctttaatattttggaaggcgcccgaattttttcgctgcgcgacctccataatcgttttttccgcatcgcttaataaatcttcaacttcatcctcgcgcgtatacccgtcttgagcgattgaggtcgccgttctgattaaacggcggagaatcgatttttcctcaacgattttcgcgtaatattctatattagccgctgtcggaacggaattcgcgatgtccgtcaggtaagagacgcctcccacctcttctaacaaatcggtattcgcaagctctgacgttaccgtgaccaaatcaaccggttcaccgcggtctccgagcacgagcatggcattgtaaattttttgatgtgacattctgtagaaatcatccggaatcaacacttcagaagccagtgttaacgcagacggctgtaaaaaaacagcacctaacacggcctgctcagcttctatgttttgcggcggcagccgatcattcagaaggtctgtcatgctaagcaccgtcctctccttaaaaaatatccaaactccattttaccatttctcaagaaaaagaatagaaaaacatcactttccctgtatttgtcaaacagcggctgcgtgtttcaccattccgaatgccgggaaacaaataaataaatcgaaaccaggaggtaagaaggatgaaaacatatgcagtaacacccaatgttgatgcggacggatggtttgtgaaggttgaaaatgtggcgccgacggctctttatacatcaaaggacgcggcgatcgagaaagcggagcagacggctaaagagaacagcccgtctaagcttgtcatttatgatcagcataaaaacattgaagaagaacgatccttttaagaaaagccttcgcccgagcgagggcttttcttattcgatgaaacggatgtgcagcaccgtctgcgccatgagatcggccgttttttgatacagctcccattcttcacaggcggcgaatactttcatcatgtcctgcaatgtctgtttcagtatgataaattcgtcaattgtccgcagttctgcggcttttttctgataatcagccagcttcagctgtaataacatcaatggcgattgcataaaaaacctcccccattctgttataaagccccgcttttcaaacctccattcctttgtcatatcctcttacgatagatttctgattttagtacaataaagaaacggaaggagtgatcacatgaaaccgctgcaaatttctgccgaaacggcgcaaaagctcgcagaatcactgaatatgccgcttgagagaatcatgcacttgcctcagcacattctgcttgccaaattagctgaagtccaaaaagagaacgatcacaaataaaggctgctctctcatatatatgtgcgggaggcggaagcgatggctttccgcctcttttttcgcggagaaaattttggtaaaacgttctttgaacggaaccgatccgattttaaccgtctcacagctgaaaaaacttgttgacgaaggaaaagtgaaacatttcttattatccggaaacaattcaggcaacacaaagcttgtctcatggatgaaaaagaacggcacaaaaatctcagctgacccatacagcaccggaaaaacaagctcagcccggcaaggaatgacaggcggcccgggcggacaaagtcagcagactctgtatgagatgaaaaaatagttcggaaagaggctggatagttaaacgccggcctctttattttgctcttgaagcacctgccatgcggcgccggtatcattcagaaaaatgattgataaatcctttctatttttgaaaccatcagttcctgacgcagatgccggccggcataggagcgcgcttcttttccaagccgtttcctgagagactgatccgtaatcagcattacgagagcatcagcaagttcgcggctgttgccgggctgacagataagccctgtggcctcatgccggatcatctcagggattcctccgcagtcagttgcgacaatggcttgacctgagaacatcgcttcgatgatcgctatagggaaattatcattcaatgtcggcaggacaaatatagatgattcagccaaaagcgccggcacatcacgtcgttttccgaggaaaaacacatttgagaggcccagtttccgtctcttctcttccagaaaccctctcatgtttccgtctccgatgatccatatatcaactccggataaatggtgccggatgcgggcgagagcgtccagcagcacatcatgtccttttcgctcggtcagacgggaaacgcacgcgatcacgagcttttcagcacgttttgactcaggggcatcctgaatgtgaataccggtatgaacagtcttcagctgggcttccttcgctccgtactccagcaagggctcgtgaaaggagtcgctgattgtaatgattttatccgaagcccgaataccctgcctttctatttcactgaaatatgcctcttctattgaacccttttggattttatgaaacttcatccggcttttcgtaaaatgtccgtgcggcgtgaaaaaaagaggacgctggtacgtttgattaaggtatcccagcaaaaataccgcaaataaatcctgcgcgtgaaacaggtcatattgttctaagtctttctccttcaaaaatctttgaaagacatgtaaatagctgagattcttcacaaacttttcgtttgcggcgccgtatctgccaacaagaaacgctctgatctcgtcagcggcccgcgggatatcttcctgaaaaaaagttggcggcatttggagcggcgagatgacatccgcctgatgaccgatgcgctcaaaacccgtcttaattgatgtgatataactcgccaaccctccgacattcgggtaacggagaaaggttgcgtacagaatacgcaatggcttttttcgtttaggggagctttttccttccgcacagaacgaatacagcatctctggctcaccttgatattcgatcccgtaaaattgatccatgacgcgcaataaggctggaggcaccagaccgttcggcttgccgatctcttctttcacatccgctccccctctctcaaacttataatcctaattcccgtccccattttgacactttgtcaacatgatacggcagcagttcccctccccgattgtcgaagattctccgcaattgggtatgaagccctttttcaagtgttctctgcaaataagccattttataaagcgtcataggaggggtctgaaaatgaatgccccgctttttcatttctttcgtatacacttttacgcaatacgtccgaatatcttctgcgtgccggctccaatcttttctgaagccaagcagaatttcaaccagcaccgtcatatcaaaccaaaccggcgcgtattttgcggattcccaatcgatgaattgaatatcccacggttcatgtccggtcgcatcgtgggtgcagatattctgcatatgaagatcaccgtgtgtgatggctgagccgttttgtatcaattcagggaaaaaatccggctcctcctgctcaagcaagtttgtgatttgccgataatgaggcttcacgatatcttttgtgcgctcatctttaagagccctatccaataattccgctgtctttttgatctgctttttacgcccttttctcatggtttccgatccgtataccggcagccacgaccgccatttaccgtcagaaatattcttgttttcaaaggtgcggctgtgcagttctgcgacagacggaataatatacttgaaatgcttcgggtgaaatgtaagctgtcccctgatctggctgacaaactccataaatatccacgtttcatggtcactttcttctataagatagatatccggcagcaaattccctaaaacggaacgggctttcccgtatatattaatctcgaccttgtttttttcacgggaagatttatataccttcaatatcagcggaacaatgccggattttttctttacaaacagtttataaatggcgcttctgtccgtcgatttcaggcatgagatgtcatccggattcaccgcagacctttcaccgaacgaatacgacagtttttcgtcaattctcagtttttgaaatgcgccatacaaaatctccttttcatacatgccgatcttccttccgcttccgtttccagctgtttttgagatgagaccaagtgtttctgataaatggcatcgggtcattccaagcaaaaagagcgtactctttttttcctttacaccctttccaaaaatcccggaacgtcatttctcctctttttcgtttcttcaaaaatgttaagaaataacgcacctcataaatccagttgattccgtctttttgttcgagctggggcttcacatgttgtccggtcaagtacagatagtacatgtaaacgaaatgaacgcctgccggttctgtcaggctatggctgagccaaaagcgcggattaatttcgataaacttgtaaacattgtcccggggatcctttttaaattccgccatgcctactcccttcagttgaatcgcttcaaaaaacggcagggtcttctcgattaaatcaggaagccgtttgctgacgacgtgggcccccgcgccaaaatcagcagggaattgatggttcttttgcagagagaataggcccattaatttcatttggtcatcataaaaagtggcgactttataaaaacactggttgtctccggggatgatctcctgcacgagcagttctccattttctctgtaggagctgaactccttgcgcaattgtgcggcatccttcattacaattgcttttttgtttactttttttctgtattcatggccggccaccggttttaaaatacacgggaagtcaatattggcgatggcctcttccagctcatcctgattgttcggaaaaaaggttttcgggcaggggatgtgatgcttgaccgctaattcatatgctttgcttttatctaaaaccgtttctaacagagagcggctcgggagcaaaaataaaaaaaagccggctaatgtctcgcggaatttagatataaatcccgcataatcatcagatcctgcgtacagaaccggctttgcttggaatcgcttcccgaaatcagtcagaaatgtcagcagttcttcctcttgtgttaaagggctgggacatatcccgcaatctgccaatcttgattttccgatacgataaggtccctccgtgtcaaacgcgtaaacatcgattcctcttcgggccaggctgcgaatgatcccaatcccgtttgcactgaaatcaagtacaacggctgcatgttcatgtttcatgatctccctccgagctgttggtattttgataaatcgattcgatattttttatcatcgtctcactgcttaaatatttctccgcgtaggcctttgcgtttgaagcagccttctcccgcgcagatttgttagagataaaaaacgctaaagcccgggcaagaacctttgcatttcccggctcgacaataagccccgttttgttatggcggatcagatccggaatacccccgcaatcggtcgcgatgatagccgagccgctgaacatcgcttcaataatcgaaataggcagactatcattaatggtcggcagtacgaatatgtccgtcatattcaaaatagcgggaacatcatctctttttcctaaaaaggagaccatagatagattcagttttcgagcctgttcctctaaggcgctcctcatctctccgtcgcccgcgatcagcacttcaacatgttcaagtagatcagacggaattcgtgaaagtgcgtcaagcaaatgattatgtccttttctcgggcctaatcttgcaatacacgagatgatgatcttatttttcggtaccggggtttttcttttcccgcctgtttttgcatcgtaatcgattcctgtgatcaccgttgtcatgtctttctgttcggctccgagcttcatgagcgggctgcggaacgtatcgctgataataatcaggcgatctgcgtattcaatggctttcatctctagttttttataataaaactcttctaccgatccttttttaaagatgtgaaatttaagtctgttgaaagtaaacatgccatgcggtgtaaaaaacaaaggtttcttatagatttgattgaatctgcctaatatattggctgtaaataaatcttgagcatgaagcacatcatatttttccagatgaatcttttgaagcatttgctcgtatataaacatcagccgattattcttcaaaatatgatcactataatccccgtatctgtcactaaagaaatcttttaatttcggaacaacatccgcccgcagttcttttacctgtgcggaaggaaactgattgggggatatgacatccaccttatgacctctttttttcagtccttcactaagcgttttaatatagtttgataaaccgcccgtgtgcgggtagtcccaaaacgtggcaatcaaaatggataacttctgtttttttccgtataatcgcggaatatgatgtgcatttttcatctgagtctttaccgccgtctttttttgagggcgcgctttgaccccgtagtagcggtcaagcgtctgaatcatatacggataggggacggaaaatgtcttgatcatttccagatcctccgcacgacttcaaaagcttcggcgtattccacacccgccgtcatccctctgactcttcctaaatgttttacgccttcatatgaacggggatgagggtaatccctcatttctacgtcatagtggtgaagcgccgcgagtttggcatccattgtgtctgtgatgttaacgaagtaattaggcttgaagagtttatcagccgtattcctctcccactcgcttgaagatagcgtttcaaacgtaagcagttcgataggcttttgattcggaagcggtctggcggctgttaaaactgcttggaatgttctctggtgatccatattgatatcgccgtaatgatgtgtaaagattttttcaggctgatagacgcgaatgagctgctctaattctttgacaagcttatgaagagggatacattccagctctaaattcgtatgctccaaaaagatgactttctcaattccaagctcttgattcgcgcgttcgcctaattgtttaatatgatgagcttcttcttttcttcctaatgccgtaataatggaaatcactttatatccttcattgatcagccgttttatggtgcccgctgctcccaatagttcatcatcgggatgagcgccgataaccataatatattctcccattttttccacactccaccaaacaaatgttacaaatatcatatgacgaccctaaaaaaaggaaacttacatatgcggattttcagaaacttacaattcccttcgccattcccggtagcgtgacggctttaatttttttatggtgttcaaaaactcatccgccaagccatatttgtccagtccttttaatagttttacgggaactcgggtaacggtcgaaaaggctcttttatggtcgatcactttaagttcaccttgttcgttgatcagaatatgcctgatttcggcatcccatctggcaaaaccgatatcttttaattcatccagcatgtttaaaatatcagctgtcagtttgacggacagggatttttcttttttgatatggcgcgcaagggaggtgcctttgacgtattccatcacaatataatgatctccgtattcatacagtttcgggatcaccggtgaaccatatccgagctgtaaagcttccaattccttcttacatgtctcttttttaaaaaaatattttacgcatttgttgtgtgttaagcgatagacctccccgtcttttccgtctccgatcagcggatagtgtttcagcgcttttttattctccggataattaaaatatgtttcagaaaaaaatcgtttcataccgacacatccttcgtcatgatgtaatataatattcaatccgtaacgatcggaaatgaaacaatctcatcattttcttgcgctgcgacgtctgctgacatgaaaaaaacccgccggatcggcgggtttttcattgtgtattacgcttcttcttttacgtgaaccttcagcacagcctgaacttcagggtgcagctttacaggaacgtttgtatatcccagtgtgcggataccgtcttggagctccagtttccgtttatccactttaatcttatgcgttttttgcagcgcttctgcaatctgtttacttgtgacagatccgaatagacggccgccttcaccggatttggcactcagctcaacagtcagctgttcaagcgtttctttcaaatctttcgctctttcaagctcggcaatcgcttcttttttctctttttctttctgtcctttcaatgcgctgatgtttgtcgcatttgcttcgacagcgaggccttttttaatgagaaagttatgtgcataaccgtctgctacgtttttcatttcgcctttttttcctttaccttttacatcttgtaagaaaataaccttcatctctgaacgcctccctcaaaatattcatcaatggcttccttcagccggacgagcgcttctgagacagaaatgcccgataactgggttgccgcattggttaaatgccctccgccatccagcgcctccataataatctgcacattgacctcgcccagcgatctcgcactgatgcacaccgtatgctcatcccgtctggctaccgcaaatgaagcttccacttcactcattgataagagggaatcagccgcctgcgcaatcagcacctggtcaaagtactcctcttcgttctcaggaagagaagcaatcgcgatatgttctttataaagagacgtatgctggatcagtttcgcccgcttgatataagaaccgacggattctttgagaactttctgcaccagaaccgtatctgcgcctttcgctctcaaataagaagcggcgtcgaacgtccgcgagcccgtgcgaagggaaaagctcttcgtatccactattataccagctaacagggccgtcgcttcaatcatattgattttgagccgcttcggctggtattcaagcagctctgtcacgagttctgcggtggatgaagcgtatggctccatataaacgagcagcgggtctttaataaattcctcgcctctgcggtggtggtcaatcacaacgatgtgctcgattttgttcacgaggcgctcttccatcacaagggacggtttatgtgtatcaacgacgacaagcagcgtgtcatcatttgaaatttccatcgcctcttccggcgtgatgaaccgcgaccacagctcttcatattttttaatttcttcaatcaggcgctgaacgcttgatccgatctggttcggatcaatgacgatgtagccttctttgccgttggcctgcgccaccttcaatattccgattgcggctccgaccgcgtccatatcaggaaatttgtgccccatgataatgacattgctgctttctgagacaatctccttgagcgcgtgagaaatcacccgggcgcgcacccttgtgcgcttctccatcggatttgttttgccgccgtaaaatttcaccttgccgttcggcattttgatcgccacttggtcgcctccgcggccgagagccaaatcgaggctggactgcgccagatctccaagctccttcaaggaagaaaccgatgcgccgatcccgatgctgagggtcaaagatacagtgtgaacggatgttttttctcgaatttcatccaaaatcgaaaatttcgcgttttcaagctccgttaaaatgtgttcatttaacaccgcgataaaccgctccgaggacgtccgtttcaggaaaatgccgtactcctgcgcccacgcatttaataatgaggtgacctggctgttcatcgtgcttctcgtttggtcatccagcccctgtgtgacgtcatcatagttatctaagaagatatatgccagcacggttctctcattttcgtactgcttttcaatctgaatctgttctgtcacatcaaagaaataaagcaggcgctcatctcttttaatcactactttaaacttccgctcattcaaggtgatcgtttccgaatcgacctcctgcttgatcagcggcacaacggcctcgcatgtgtcatacagcgagcgtccgacgagcgtgctttcattaaaacaggaagacaaaaacggattcgcccactcaatgtaatattgatcattaaacagcataattccgataggcatttccattaatgcctcttcgcctacttttttcaatctatacgataacgtggagatataatcgtcaatttcttttctgatcagagaatccgcacgcttaatgaaaaacaagatcacggcgagcagtacaacgccgatggctcctatcagccagttaaagtaaatgctgatgagaattatgatgattgacaatgcaatcaatgcatagatgggataccgaaacaacggtttttcataaaaactaggcatttctatcaactccccacctgtaagtcacactcaatttcgcgtcaccttatttcttatgttaaagcctatgtcaatgatgcctaagaggagatacacggacaagatgagcggaaaaagcacccccagcacaattgctaatacaggaacggctttcggcatctccatttcgcggcaatagaaaaaaataaacgctaatccttgaatacaaatcagcaagctgagaataaatcccccattcaatgaaaccgaatacagcatatgccctttttctaaaggcagaaaccctaatatcgtcacaataaaatacagaatgacaacgctttgcgggagtttgagctctctaaaaggcttcatcttcggaagatcaggggaaaatcgccgtaaaagcggccttgccatagcataactgaggaaagaaaaaacgatgccggtcaatacgagcactgtcggaaaaagatattgaaccgtgctcagctgactttccatcagcttgatctgcttcccgaactggtctccgtaaccgagctgttttgacatggtatcagccacagacagcgactcccgaagctgggacatggtggtatcaaccacattcatattaagaaacacgatgctgaccacaaaaaaaacgacgccgcacagcacatacgccatagcgccggcagcaaccgcatagccgggctgtttctttttaaaataatatcccatggcgattcccgtacaggccgccgtaaaagcgcctgtaagcccggtaaacgaacttacaataaagctgacaggaaggctggcaagccccatccataccccgggcttcagaccgtgccgaatggtgtaaagaatgatcggcagcggcaaagcaaagagaagaattgcccccagtaaagggaggtacacgaccaaaagggaaatgattgcaaaaatactgatcaaaatggcgccttctattagagcccttgtatttttcacttactcacctcaaaccttgtatcattcgaacatacgaatagaaaagagcagcttagacgactgctcttttgacgccgcaatgtctctttcaagacctgaattttccataaactctccaaaatacacgtatatattttaacataagtcgaaatcgcaagtaaaatgagcgcggacagccgcaatgttccatgtgaaacatgaaaacagacaaacggacatcccagtgaaagaatgcccgttgtatcagtgatcctgatcatccatgaaaccagaagtatctctgtttttctttttggtttttcgtacatataacaagacgataacgataagtaagagagtggtcgcctgcaaaaccccgctgctgaaaaggaagaagttctttatcatgtcccacatatagtttcacctctatttcgtatttcctttacattgagtttccctttctggaaacttcaaaacatcaggaacaacatcgggaccggggcatatgctgaaagtgaaaatgaaggataaaggagattcttacaccatgactgagcggagaacattagcatggcatgaaacgttagaactgcatgagttagtagctttccaggcaaacggacttgtgaaattaaaaagaacagagcgggacgtaagcgatgccagattaaaacagctctacagattttccatccattcgctggaacaaaatctgcgtgaactgcttcctttcttccctgaagctcccgcttttcgtgaggatgaaacagaagagcgcgctgattcctccttttacagcggcggcctgctcattctggccaaaacatctgtccgcaattatgccggagccattacagagacggccacacctcaattaagacacgtcttcgtcaagcacttaaacgcggccatcaagtggcaccaaatggtctttgagtatatggaagaacggggtcaatatccggcttacaacctgagcgaattgctgaaaaatgatgtacgcaatgccagaaaagccatcgcgatgaaataaaaaaaagcagcaaggaatttaatcctttgctgcttcttatttttgagcggactgatcttgaggagacgttttttcccggtatgcctcgagaaactcccggttggcatctccccatttcttcatttgcaaaacgatcggttccagcgacctgccgaattcggtaagagaatactccacctttggaggcacctgctgatatacctcccgatgcacgatgccgtccgcctcaagctcgcgaagctgaagcgtcagcatacgttgcgtaatgctggggcaaatgcgccgaaactcattaaaccgcttttttccgccgatcatatgataaaacaaaatacccttccactttccgccgataacggaaagcgtcagttcaaccggacaaccttctttattcggatatatgttcatttttcatcctccatagtaccttttttgatactatatgctgattagcatctgacttacccagtattttactcgcaaccctccccacctctcaacaaaaatgcttctttttcacatcaatttttaaggttttgaagattacaccctcctcaagacgtgttaaactataaaaagattgtttacactacaaaaaaggacaaggagttattatggaaaaaattcttattttcggacatcaaaacccagacacagataccatttgctctgccattgcctacgctgatctaaaaaataaactcggctctaatgctgagcccgtccgcctcggacaagtcaacggcgaaacacaatacgcgcttgattattttaagcaggaaagcccgcgtttggtggaaacagccgcaaacgaagtaaacggcgtcatccttgttgaccacaatgaacgccagcaaagcatcaaggatatcgaagacgttcaggttcttgaagttatcgaccaccaccgtatcgccaacttcgaaacagcggaacctctttactaccgtgctgagccggtcggctgtacggctacgatcttaaacaaaatgtacaaagaaaataacgtgaaaatcgagaaagaaattgcaggcctcatgctgtcagcaatcatttccgactctctgttatttaaatctccgacttgcacggagcaagatatcgcagcggcaaaagagcttgctgaaattgccggcgtagatgcggaagagtacggcttaaacatgctgaaagcgggcgccgacttaagcaaaaaaactgtggaagaactgatttctcttgatgcgaaagagttcacgctcggcagcaaaaaagtcgaaatcgcccaagtcaacacagttgatattgaagatgttaaaaagcggcagccggaattagaagcggctctttcaaaagtaattgctgagaagaaccttgacctgttccttctcgtgattacggatattctggaaaacgattcccttgcgcttgccatcggtgatcaagcgtcaaaagtggaaaaagcattcaacgtgactttagaaaacaacacggctcttttaaaaggcgtcgtatccagaaagaaacaagtcgttcctgttttaacagacgcgattgcagaataaccaacacaccccggaaaccagccggggtgtttttttattgctcattcatcagacggccgtttcgtaagcgctttcccccgaaaatcattttgacggaatttaatatacaatatataatatatcacatggaggacgttcatttcctaattattgttagttactatcacaacgtcagaatcgggggtgtctatcctggaaaaacacgctgctctttcttattcacgaacaacaggcatttggcttgtgctgacaggagctatcttatggggggtctcgggaacggttgcccagtatctgttccagcaccgccattttaatacagaatggctgacttcagtgcgccttctggtgtcaggggcgcttctgctcggcatcgcgtaccgcaaagaaaaaggacggatatgggctgtttggaaagacagacgggacagaattccccttcttttattcgggattttcggaatgttaggcgttcaatacacctacttcgcggcaattgagtacggcaacgcggccgctgcaaccgttcttcagtatttagggccggcgatcattacatgctttttagcgattcgcgcaaagagaattccttcagcaaaagagctgctcgccgtcttattggcggttgccggcacattcattttggtcacgcacgggaatgtcggaagcctgtccatatccggtctggccgtcttttggggcatcagttcggcgtttgcactggcgttttacacccttcagccgcatcgtctgctgaagaaatggggatcggccattattgtcggatggggcatgctgatcggcggagccgccctcagcttgatccgcccgccctggacatttgaaggcgagtggtcctttcctgcatatgccgcgatcgtgtttatcatcattttcggaacgctcatcgctttttattgctacttggaaagcctgaaatatctgagtgcctctgaaaccagcctgctcgcctgtgcagagccgctgtcggcagcttttttagctgtgatctggctgcatgttcccttcggaatatcagaatggctgggtactttgctgattttagccaccatcgctttattatctatcaagcaaaaataacctctcttttttagagaggttttttcctaggcccagagcaccccttagtctcaattacccatatattaaaaggccttttttcattttactatcatccaaaagaggaaaatagaccagttgtcaatagaatcagagtctaatagaatgatgtcgacaagtaaatcatgcaggattgttactgataaagcaggcaagacctaaaatgtgttaagggcaaagtgtattctttggcgtcaccccatacatattttaggtctttttttctgtaacaaacctgccatccatgaatgcaggaggatcgaatcggcagatcgcaaaaaaaggtacatacaaaaggagacatgaacatgaacatcaaaaaatttgcaaaacaagccacagttctaacttttacgactgcacttctggcagggggagcgactcaagccttcgcgaaagaacatacccaaaaaccttacaaagaaacgtacggcgtctctcacatcacacgccatgatatgctgcagatccctaaacagcagcaaagtgaaaaataccaagtgcctcaattcgaccaatcaacaattaaaaatatcgagtccgcaaaaggactggatgtgtgggacagctggccgctccaaaacgctgacggaacagtagctgaatacaacggctatcacgtcgtgtttgctcttgccggaagcccgaaagacgctgatgacacatccatctacatgttttatcaaaaagtcggcgacaactcgatcgacagctggaaaaacgcgggccgtgtctttaaagacagcgataagttcgacgccaacgatgaaatcctgaaagaacagacacaagaatggtccggttctgcaacctttacatctgacggaaaaatccgtttattctacactgacttttccggtacacattacggcaaacaaagcctgacaacggcgcaggtaaatgtgtcaaaatctgatgacacgctcaagatcaacggagtggaagatcataaaacgatttttgacggtgacggaaaaacatatcaaaacgttcagcagtttatcgatgaagggaactatacatccggcgacaaccatacgctgagagaccctcactacgttgaagacaaaggccataaataccttgtattcgaagccaacacgggaacagataacggataccaaggcgaagaatctttatttaacaaagcgtactacggcggcagcacaaacttcttccgtaaagaaagtcagaagcttcagcaaagtgctaaaaaacgcgatgctgaattagcgaacggcgccctcggtatcgtagaattaaacaatgactacacattgaaaaaagtcatgaagccgctgatcacttcaaacacggtaactgatgaaatcgagcgcgcgaatgttttcaaaatgaacggcaaatggtatctgttcactgattcacgcggttcaaaaatgacgatcgacggtattaactccaacgatatctacatgcttggttatgtatcaaactctttaacaggtccttacaagccgctgaacaaaactggtcttgtactgcaaatgggtcttgatcctaacgatgtaacgttcacttactctcacttcgcagtgccgcaagccaaaggcaacaatgtcgtgatcacaagctacatgacaaacagaggcttctttgaggataaaaaggcaacatttgcgccaagcttcttaatgaacatcaaaggtaagaaaacatccgttgttaaaaacagcatccttgaacaaggacagcttacggttaacaactaataacaacaaaaagaaaatgccgatacttcattggcattttcttttatttctcaacaagatggtgaactcaatcatggcacgaaaatggcccgttgtaatattgatctttttgggtgcgttcctgtttgtcggcttactgccgaacaaaagccacaattcctctgacacaaacacggagcataagaaagattaccgtgcggcgtatcattttacgaccccggacaaatggaaaaacgaccctcaaaagcccatttttttcgaggggaaatatcattactactatctttataatcgggattacccgaacggcaacggcacagaatggcggcatgccgtatcagaggacttggtgcactggacggacgaaggcacggctattccgaaatacaccaacgaaaacggcgatatatggtccggttctgtcgtcattgataaacacaacaccgcgggcttcggcaaaaacgcgctggtcgccgtcacaacgcagccgacagccaaaacaaaagcccaggaacaatatttatggtacagcacggacaaaggaaaaacgtttacttcctatagtgatcagcccgtgatgaaaaatccgggaactaaggatttccgggacccgaaagtgatctgggatgaacaggatgacaaatgggtgatggccatggccgaaggcgaaaaaatcggtttttatgaatcacccgatttaaaaaattggacatacacgggcggttttatcactcagcagatcggcctcgtcgaatgccccgacctttatatgatgcgtgcagatgacggaacagccaagtgggttctgggcgcaagcgcaaacggcaaacccgcaggcaaaccgaatacgtacgcgtattggaccggaaactttgacgggaaggaatttacccccgatcaagaagaaccgcaatggctcgattacggctttgactggtacggcggcgtcacatttgaggacggtaatagcgaagatccgctgacaaaacgctatgcgctggcatggatgaacaattgggattatccgaatgaaacaccgacactaaaaaacggctttaacggtacggattctatcgtccgtgaaatccgccttcagcagcaggaaggcggcacatacagcctagtgtcagagccggttgaagcattgaaccaattaacctcttcaactgacagcatagaacacaaacaggtgaacggttcagagacactgccgatcaaaggtgacacatatcagcttgatatggatatcgcttggtcagatatcaaaaatgcaggcgtcagactcagagaatcagcagaccaaagccggcatattgatgtcggtatttcagcagaagacggctacgcctatgtgaacagatcgtttacagaccagcctgataaaaccggtgcatacgccgaaagcaaagccccatttgacggaaacaaagggcgcgtccatctgaaaattctcgtggataaaacaagtattgaagtatttgcagacgacggaaaaaccgttttgacaaatgaagtgttcccaaaacacgaagatcagggaatcacgctcttttctgaaggcggctccgctgactttcagcatattgagatgaagcatctcggttcgattcattcttagacgtccctcttcatttctaaccagcgcccggactgtggtaaaatgcaaatatgtatactacgattcatgaggtgttccattggataatcaaaacaaagaacctgtgctgaaaagaaccatcatgcgggacgaagtgtatcgcacactcagaaactggatcataacgggcaagctcaaaccggaaacaaagttaaaggacaaggatttgtcggaaacattgggaatcagccgcaccccgatacgggaagccttattgcggctggaagatgacggcttggtgataacaaaagcgaacagatggacgcttgtcgctccgattgagttaaaagaagcggaaaacttgtattccatcgtctggacgcttgagaaactcgcattgcagcaagccctcccgcgtatggacgatgccgtgattcaagaattgaaacagctaaatgaaaatcttcttcaaacgatgaaagacggcgataaactggccgttctggaagcggacaatgcatttcaccatcgcatcattctgcttgcggacaacgctgaacttcacaaattgctagtaagcctgaaagtcaaaattcagagactggaaatccgctatttcagtgaaaacggcgctttaaacagatcatataatgaacactctgatatcattcacgcattagaacagcaagatgccgccgctgcttttacagcgcttgaagcgaattggaaaaacagtttagaacggctgcagaacatggcatagcaaacgaaaaagccaaatcactcatatgatttggcttttttacggatatcacaagacagccgcgttggctgtcttgtttactttttgtttatatataaatacataccgtaatccgtcggcacagaagcataccccatctgtctgagcatggctgttatattcccgcgatgatacgttccgtggttcacaacatggaggatcatatcggccgctgcggttttcatgatgtcacctgacggatgctctatttcaagggggagactgatattttcttccttttgcaaaaataattgataccggtctgataattccaaaaacatatcttccagctcttctatctctttagacaagatgtcctctttttgctgttcagctgatttcagcgtatcctccagacgctctccggagaacacatcaaaccaccccttatccgacagatacacatgagtcaatacaccggctatcgacggaaagacactttgaatctccttacggtacacatcctccggaagctctttaagccgggtgaatatttgctgatttgcccaaagatgataatcatacaattgcagtgccagatgtcccacattaccctctcctctctcgatatatagaacgtacgttcctcattatactacactacatgcggctttgtaccaatttcttcattcgcagctgagaaaatccgataaaagccgaaattaataagagaaggcctgcgccgatataaataaaccgcacgccgaatacatccgagataacccccgttccgataatggaaaacataaaaatgaactgaactaaagctgatctcgctgctagtatattgacccgtgtcttttcggtcgtgatgttttggagtaatgtttcctgcgagagatctcgtaatacacaagccggccccatacacagcaccagaaaaagggccgtaacggcgcttgtgatcaacccataaataaacgtgaacattccatatgccaaggctcccgtcagcataagcggaatgagatgatgctgaaacttgccggataacttgtagatgatcagtccgccgatcatcgtccctgcataatagactccgttgacatacccccaccaagcctctcctttatgaaggacgtcatgcacataagtcaaggacacagacccgatccatatcatgcctgcccacgattcgatcacatccatcacaatgagaaccctgagctgtttttgctgaaataaatacacccagccgcttgccgcatctgcaaaaagggaacgttccctgactgctgccggcgcacacatgcgtacttgaagaaacagaatgatgcccaaaaccgaagaaaccaataacatgacagtgacgatcattgtatcgctctctcccaagaacgctatgatgacgccgccgagagaccaccccgcaaactgaacggtctgatccgccgcagataataaaccgttcgctttcgcccttcgatcaggaggaatgatttccccaatcagcgcgctttttatcggagcaaaccatccgttgcaaaaagaaatgcctccgatcagacaaaacatcagaaaaaagaatgcggatgaaccggtttggatgacaaaaaacaaacagactaacagtgtgatctgaatcaattgagaaccgattaacaaagaacgaagcgtgaaccggccggtgaccagcggcaaaacggcgctgcccaatacgcgacatacaatgctgacgaacgtcataagagaggccatcgccgtcgaaccggtttttgtaaacaaaaacaagatgacagccatcgtataaagtgagaaccccaagttgatagcggtctggctgtataaaatagcgtaatacgctctcttcatattcatcctcagcaacctcactccccaaagccgaagcgcgcaggcatcggcttattttttcgtttactttctctccttagtgggaggctttcgtatgtcaggctctcacctttaatttgatctttctgccttccgaaaaagtaatcatgcttaggacaatgtaacagcctatccactgtatccatgttaagcgctcgcccaagaaaaaagcgccaaagatgattgtgatgatcgggcccatcattgaaatcaaagaccctcttactgccccaatccgtttgataccttccagcataaataaaaaaggaacgactgttgtaaatacagcaatgattaaaaaaaggaaatatacgggtggctgaaacgaccatagctctgtctgatagccaaaaccctttcttgcgattaaaaaaagcaccatggcaatgcttgctaaggacatcccatatgcattcatacggatactccctactttgcgaacaagctgaccggataagaccaaataaagtccgtaaaccgcggacgacagaagaacgagaaaagcgccaaatatattagcactcaattcgtgcaggttccagccgccaatggaaaaaaagattcctatgctgaccacaacgacagaaatgatgtctgcagcggttattttctccatttttccgaaaaacgagataatcatgacaaaaatcggataactcataacgagcatcctttctacaatagctgaaacataatgcagcccgataaagtccaacagcggagatagaaaaaaaacgagcagacccgtgattcctgctctgactatatcagcctttgccggtttttcagataattttgcacgatacataagaaaaatgatgcaaaaaagaggggttgcaatcaattgtctgaaaaatagcgttgactccggggtggctccgaatgtgtaagcccacttaataaagatcgactttgaggcaaaacacagcgtaccaacaatcataaacaacattccggcgagaaacggatggtttagttttggcggagtattcacttcgactttgctcatagatttacacctttccttagtgcgaatattatttatttcgattctgcgagcagtttccctttttgttttatatactaaaatgtatttctatcacccgaaaaaaagccgatgcgcgcaggcatcggctttcaaattaacctatcatctcaagaacaagcggccggaatcagccatttatcaggaatgatttttaaaacagaataaaaaaagagggcttcctttccggaagccctcactccgtctgctacgccaataaaagaaaaataagcgctaaaacagccggaagtccttgttttacgataattgatttgtttgaagtaaagcctccgaaaatggccgcgatgaccacacagatgacgaaaaacaattgaatcatatggcccatcggatcagctccgaggatcagcccccaaatgagaccggcagccagaaatccattatacagaccttgatttgcaaacatgaccgctacattccggtcaccttctaaatgcttcggcaatttgaaggaccgcttagctgccttcgaattgataaaaaacatttcaagtatcatgataaatacatgttctaaagctacaattccgacgaaaacagctgcaataatctccactgtcccactcccctcagcttcacttcaaccttatttccattgtgcgattgtttcgataggaagacggtaggaagcatatccttcgtctgccgcttttccgattgataacagcatgaccggtacataacgctctttatccattccgaaaacctcggcaatcttttctttatcgtagccgccgatcgggtttgtgtcatagccgtgcgcgcgcgccgtaagcatcagctgcatggaaacgagtcctccgtcaatcaaaatcgtttcacggttcacttgctccggcagtttttcaaagtgtgccgtcaacgcagcgatttgtctgtcttttacttcctgcggcatgtagcccagttcgaccgcttttgaataaatttcttctaaatagtcatcactgttcatatctgcgaaaaccgcgatcaccgcagatgatgtgctgacttgtgtttggttaaagctggcaagcggcgcgagtttttcttttccttccgggctgtcaatgacgagaaaacgccacggctgcgcgttgactgaagacggtgctgtcgttgcttcttccaggatttgagtcatttcttctttgctgatttttacggccggatcgtaattccgaatggaacggcgccctttcataatgtccataaagtcgtttgttttcagttctgttttcatgtgtaaaacactcctatgctttcatattttctatattattctgcatctgtgacaatacgttttttaacatactgcgttcttcctcgctgacaccggcaagcatttcctttatgaaacgctccttctcctttttggaagcctcaattctctcccgcccctgttcagtaagccggacaagtataattcggttgtcctcgggcttccgccttcttgtgaccatttctttggcttcaagctgtttcaagtgtcttgtcacggctgcgccatcaatattcacctttttctgaagatcgctttggctgatctcatcggcgtaaaaaagcacggcgagaagctcaaggcgggattggctgattccggtgcacgcttcaaacttcgtgccgatcactttatgcagtgattggagctgatataaaatctcgccttcctctgaacaacatgctgtcaaaacccatccccactttcttttgcgcaattaattgactagtcaatgtttgatatatcaataatatacagccgtcattctatttttgcaagttttttctccttttttaaaaaaagctgccgattaacggcagctcgcttcttaatgattatggacttttctgaaattactgccttttacttctgcgacatcatataccgtcacaaaggcttgtttatcaatgtcattaataatttctttcagtttggtttcttctaaacggttgataacacacgtgatttctttgaatttttcatgagaaaaaccgccgtatgcttctttatacgtagcgctccggcccaattcttcacgaatggtctctaccattaatgcaggctcattggtgataatctgaaatgttttagaaccgcttaagccttcctcaaccacatgaatgaccttagacgcaatgtagtaagcaatgacggaaagcaatgcgccttgcagcccgaatacaaaagaaacaaaaataaacacaaacatgtttaaaaataaaatgaggtcgctcgtgccaaacggcaatttccgtgacagaagcacagccagcatatcaattccatctaatgcgccgccgttgcgcaatgccaatcccattccaaagccgagaataatcccgccgacaacggtgattaacagggtgtctccctctatgatagccggtgtgtggtggaaaaaactcgtgcctgcggcaagtgagacaataccgataattgatagaaacgcaaaacctttaccgatttgcttatatcctaaccagacaaacggtatattgatcaccgcaattaagatcccaagaggcaaatgaaacagctgtgaaccgacaatgctgagtccggttacaccgccgtcagatacactattcggaatcaatacggtttccagtccatacgcggcaataattccgccgatgatgaccatgatggcccgtacgattgatttcactctgaatttcttacgtctttgtttttcgattgtactcatatcattccccgcttcaattattttttcttatttaaatataccataattgatacttttcgttaaaaataagcctatcggctatgttgaagcaggaaccgaggaaggagatgtcacagataacgtatccatttatgactttaatcattcacaacgtaatcattcattaaaaggaattaataaccattaataatctcttttattccccttcttcacatattcccaatcatgttctatattttttctcacccgctgaagaaggctgaaaatggtttctttttcctcagatgtaaagccggacagggctacctccgcagaatgctctccttctctttgcaataacggataaacctttctccctttttcagtcggaaacagtttttttatttttttattttgatcatcaggacgcttttcaataaacccctgtatttccagttttttgattgccctcgccgctgttgttcggtcgactttaatcatttccgccactttttcctgtatcactcccgggttttcacatatacgcacaagatagagatactgcccttttgttaagtctaattctttaaattcaatattgctgatggaatccagtgcccgtgcgatcatgccgatttcccgcaaaatatcagtcatatcttttcaaacccttcattttttgttgcatttacaatataattattttatcgttacttctataagaccacaagcaagccgtgcagtccagactaacatgtgaaaaggattggttgattatgaggataaaaagaataacaacggaaattgatttacaagcagcgcttgagattagaaaagcagtattcattgaggaacagcaagtacctgaaaccgatgaatttgatcagttcgatacgcttgaggatcagtgcgggcatgtcttggtttatcatgaaaatcagcctgccggcacaggacgcgtccgcatcgtaaaccatacaggcaagctcgaacgaatctgcatcctgaagccttaccgtaaatacgggttgggcaaagtaatcataagcgaattagaaaacatggtaaaagaaaaaggcatcacccaatgtaaactgcatggacaaacacatgcggaaggcttttatcacaaactgggctatcagacagattcaccggaatttatggaagacggcatcccgcatgtcttgatgacaaaagagctgtgagctgtcactgaatgagcagccaaacggctgtatgaattatttaccgaaagccttgtataaaggctttttttcttagcctgaaactcaaattaaaaggtatgtgtgctcagccggtgcttgtcacaaatgaccgccacaaaaaaatcaaagctggaataaaactaccaatttaagcttttaatctattaaaaattaacagttaaagagattataaaaagggaagaaaatctcaaattatacaagaaaggctgattctctctaatatggactgctgacgcgttacattttttctatcttcacatatctttaatactacgtacgttataaatagattccaggaggagatatgaagtggaagaaacgagtatggagccatcacggctctgcaaagaatttgctagaattctcaattcaacgcccagtgtcgtaaatggcgtatgtacggcgacaagatttcgaagcaacattcatccggtggtactcggaagaagagccgaggcatttccttttattcctcaggccttttcatttgaaagcatggatcgggaaggcagagctttatgtttaggtgagactgttttactgcaagaagaagtgaacccgttaatgagtgagctgcgcaaattcggtatcatcgtaactgccgttcataaccattggctgtttgataaaccgcgtctgatgtttatgcattttgaatcaattgataaacctctcaattttgcaagaaaagtcagagaggccctgagagttctaactactaaaactgtgcgtgcggtaccaaaaactgacggggaaatgattgaacggcatggtctttgtgacgagttcaacgatattctaggcggaaccatgcatacgtttgaaaatggaatttgtacagtaatgagatcacgaacgaatataaaaccagtagtactgggacggcccggaagatcattcttgctcattccgcaaatgttttcatttgaatcaatgacaaaagacggccgtgctctttgcagcggagaaactgtcattctgcaaaaagaaatcaatccatttatcagcgttcttcggaaacatgatctgattgtaacgtcacttcacaatcactggctgtttgataaaccgagactgatgtatattcatttcgaagcgattgataaacctgtcaacttcgccttaaaagtgagagatgctttaaaagtgcttactgataaagaggtcaaagcttagcatgtttcgaagtatcaaaaagcgattaatataatcgcttttacatatgatcaaccgaaaacaaaaaagagaccatatataggtctggcacgacatttttatgataagcgagactattaaaaaacagccttataggctgtcgttttgtgtatattctattgatgagtttatactaattcatcccgcattcctatttctcaatggttttctacatgtcgttgtgcaaacaccttcttagccactgaaagagcattaagtacacgcgggaatcctgtataaggaaccaattgggtgatactctctacaatctcagtcggcgttaatccggatgtaagccctgtattgatatgaagttcaagctgcggctcggttccttgcgttacaagggatgaaatggtaacaagcgcacgttgttgattggttaatcccggtcgtgaatatatatctccataagcaaattctatcatgtacttacttacatctggggcgatatctttcaagtcttcagaaatctttaaatgcgtagagattttatcatcgcttgttaaagtgtactccattaatttgtctaaaccttgttggtaacggctttggtccattcgaatttcctcctgaaaggtacttattttctgacataagataatatatcgcagccctctctaaccgtaaaatacataaaaactataaaaatcattcatttttttcatgagttatcttgatttacgtaattactcttacaaaaaaatgaaatataccggataaattcgcgtactgcgtgtgaaacatatttgcctttttttaaaataatcgccactttccaaggaattgatggattgacaatggaaattgccttaactaaactttgatcagtctttttcactatagactgaggaaaaatggaaatacctagttcttctccaatcatttcgctgataaaatcccattgagaactttcataaacgatatttggacgaaaaccggctctaatacactcttgaataatccgatcgtgaagagagaagtcttcactaaacaggatgaaaggttcatttttcaagtcttgcatttccacaatctctttatgaacaagcgggtgagcggaatgaacgaagagcatcagttcttcattaagcaatggaatgatatcaaactgctcttcgtccactggttcaataaccacgccaagatccagtaccccatcttcaacctcctgtttcaccttgtttcccccatgttctatcagcttgatgttcacatcaggatacaattgtttaaatcctttaatgattttaggaaaaaacaagacaccgataagcggcggtattccaattttcacttttcctttttttaaatgtaaaagatcgtataagttcgtcgacaagtcatctattgacttcataatcatttggccttgctcaaatacaatttcgcctgcatctgtcaaagcgatttgtctagctgaacgatcaatgagctcaacctttaattcctcttccaaacttttcaccatcttacttaagggaggctgtgacaaatgcaaattttctgatgccttagtaaaactgttggatttagcaacttcaagaaagtatgtgatttggcgtatatccatcgtatgatctccattccataagtttaacgaatacattatattctttttattcattttacttatacaactgctgggtgtaaacttttaggagaccaaaatgaattctggaggggttactatgagtaaattattggaaagtaaagttgctcttgttacaggcgcggcgagtggaattggtttagaaattgcacgtgaattcgctaaagaaggcgcaaaagttgtgatttccgatttgaacgaaaaagccgtgcaacatgcagctgaggaacttacggaacaaggatacgaagtcctctctgcggtttgtgatgtaacaaacgaagaacaagtagaaaaatgtgtctctaagacacttgaaacctttggacgattggatattctggtaaacaatgcggggattcagcatgtgtcggatatagaaaacttcccgactgataagtttgaatttatgctgaaattaatgcttactgctccttttagtgcgacaaaaagagtattccctttgatgaaaaaacaaaaatttggccgcatcatcaatatggcttccataaatggtttaattggttttgcagggaaagcagcttattgcagcgctaaacacggtttgatcggtttaactaaagtatcagcattggaaggagcggaatacggaattaccgtcaacgccttgtgcccgggatatatcgacactccattggtgcaaaaccagttaaaagatattgcagagactagaggcatttctaaagaaaaggtgtttgaagaagtcatttaccccttggttcctcaaaaacgtttgttagccgtgcaagaaatcgctgattacgcagtattcctcgccagtgacaaagcgaaaggcgttacagggcaggcagtcgtaatggatggcggttatacagcccaataatctgaatttcatctgcaggagtcatagcgctttggattaaatgatttactcttcaagaaccaagccgatggttttttaggaaagacatagctatacagattgaagtttgatatatatttggtatattaacttaagaaaagccgccctgttgggcttttttactggttttcatgaggggaaaagaagcatttgaaaaagcgaaacgcgaaaacaagccgattcttgtcattgatagcatgtctctttctattaaagtaatcattatatatttatctgcttgccaattccttaatcatcaaacccaattcataaattcccttttgaaggtcttcaagagatgcataagcatatgataagcgaatataattccctttttcttgagcatagatactgccgagattgagaagtatcccttttgtcaaagcttttgtataaagtaatttcatagatagtgaaggcaatatttttacccagacaaagaatcctcccttcggcatattccatatagcgacattcttcaaattggtttctaagagactcatgaccaattgccttctcacctttaattgacttctcacctgttctagatgttgctggtattcaccggatgtaaaccactctgccgctactctctgagataacgaactggagccgtaatctgtttgcatttttatgtcggataaacgttcaatcactggttccggaccgacgatccatccaatcctcaagcccggacttaacgttttcgataaactgcctatgtaaagcacatgcccatttttatctattgttttaataggatctggaggaatctcatctatccataactcacgataaatgtcatcttcaataatgggaagctgtgcattctcacttgccgcaaggatttcttcccgtctcttttttgacattaaaatacctgtcggattatgaaaacaaggatttgtatataagatagccctcccccgttccccccttgccatgtggatctgtctcggcaaaagcccatcgttatccataggaactccagtcagcttcataccggctgattgaaatacgtgtaatgaataaagataggacggctgatcgagaaatacggtcgatcccctttgtaacagccccattgatatcagctgcaaggcttgcagtgcgcccgaaacaataagaatggaagaaggagaagcttgaatcccgattgttcttaaatagccgcttaatgcctctctcaaaggcaaatagccttttggttcctcatacccgaatgcctctatgttttgagatacctttcccatgatctctttcataacagctaaaggaaaaatctcatgtgaaagttctcctttactgagctgtataagatcagaattcgattctgatttattgatctcttgaacgattttttggcttggctgctggattccggaggttacatactgatcccaatcgggggcggaattcttagccaaaagtgtccatgtattgttcgtaacaactgtccctttgcccattctgccttcgattaatccatccgccgtcaattcctctaaagctgtaatgactgtgctcctgttcacctcaaagtgtttagcaagcgtgcgctggcttggaatcttacttccaatcggccattctccatttcctattttctcttttataaattgaatgatttgtatgtacttaggaagctttttcatctttttttcttctggagcgctcataaaaaggatcctccttaaagtggttgggtcaaaatctatttaactggttgaagtcatatcatcaaatctttattaatatagaaacacattaaataactggttggtttttgtaaagaggagtgagaaagatgcaaaagaaaacagttcgaatcggcatagcttacattctgatgattgggttgtgggcatcagctttcccgggaattcgcgcgggtttggagagttacacgccggaacacctcgctttgtttcgcttgttgattgggtcaatggcattggtggtttttgctgttttgactcatatgcgtttgcctgacatgaaggatatccctgctattttatcgttaggatttttaggttttgcactatatcacattttgctgaatatcggagaaaaaacagttagcgcagggacagcaagcttactcgtgaccatgacacctattttttctgcaatgttatctcgtctgttttttggtgaacattttgggctttataaatggattggctctatcattagcttattcggtgtatcgtttatttcatttggggcaggagactatacaaattcagtgaacggcattttgttaatcctgctggcagctttctcggagagtatttatttcgtttttcaagctcgctatataaaaaaatatggatttattccatttgttacattcactatttggggcgggacaatacctatgcttgtatttctgcctggcttaggggaagagtttttgaacgcttcaatgaactcaacattgtcaatcgtttacttaggtttattaccaacggttgtgccttactttgcacttgcgtatgtaacttcactcgtcggtgcttcagaagcagccatttcactttatttaacaccagccgtagccttggccatttcttgggtgtggttaggtgaggtacctgcgtttattgcactgacaggcgggatggttacagtcgccggagtgtgtttcacctatctaacagtaaataaaacgataaagattttaaatccttacttcttatctaaaaagcaataaggtagatgaagtttaaccctgaaaatagagtcataagcagttctcctttttaatgacttgggtttggttcacaaagttgagtgtatgaatttttttagaggattgtggtatgttaaacatacaaatattaatagaaagcaggtgagcccatgccaaacaatagcaaacccaacagtttaatcatggagaagtccccctatctgctccaacacgcccacaaccccgtaaactggtatccttggggagaagaagccttcgaaaaagcgaaacgcgaaaacaagccggttcttatcagcatcggctattcgacgtgtcactggtgccacgtaatggcccacgagtcctttgaggacgaagagatcgccggtatattaaacgataaattcatagcaatcaaggttgaccgcgaggagcggcctgatgtggattccgtgtatatgagaatctgccagctgatgacggggcagggcgggtggccgctgaacgtgttcgtcacaccagatcagaagccgttttatgcggggacgtattttccgaagacgagcaaatttaaccgcccgggctttatcgatgtgcttgaacatctgtccgaaacgtttgcgaatgaccggcagcatgtcgaggatatcgccgaaaacgccgccgctcatcttgaagtcaaggttcacccggccgagggcatgcttggcgaacaggcggttcatgacacgtatcgccagctggccggcgggtttgatacagtgtacggcggattcggccaggctccgaaatttccgatgccgcatatgctcatgtttctgcttcgctactacagctatacgggcaaggaacaggctttggccggcgtaaccaagacactcgacggcatggcgaacggcggaatttttgaccacattgggtacggctttgcccgctactcgactgataatgaatggctcgtgccgcattttgagaaaatgctgtatgacaacgcccttctcctgaccgcatatacagaagcctaccaagtcacgggtaatgagcgctacaaacagattgcgatgcagatcgtaacgtttattcagcgggaaatgatgcatgaagacggcagctttttctcagctttagacgctgataccgaaggccgtgaggggaaatattacatatggtccaaaaaagaaatcatgaatcttctcggtgatgaactcggcccgctttactgcaaggtgtataacatcacagatcaaggcaattttgaaggcaaaaacatcccgcacctcattttcacgcggcgtgaggccatcctcgaagagaccggccttaccggacaggagctggccgaacgccttgaagaggcaagaacaaaattgctggaggcccgtgaaaacagaagctatccgcatacagatgacaaagtgctgacctcatggaacgcgctcatgattgccgggctggcaaaagccgcaaaggtatttcacgagcctgactttctcagcatggcggaaacagcgatccgctttctcgaacgacacctcatgccggacgggcgcgtcatggtccgctatcgcgagggcgaagtgaaaaataaagggtttatcgatgattacgcttttctcatctgggcttaccttgaactgtatgaagcgggttttaatccgtcttatctgcagaaagcgaaaacgttatgtacaagcatgctggagctgttctgggatgaacggcacggaggtttcttctttacggggaatgatgccgagacccttcttgtcagggaaaaagaggtttatgacggggccgtgccttccggaaacagcgcggctgccgtacagctgcttcgtctcggccgcctgacgggtgatatatcactgattgaaaaagccgaagcgatgttttccgtgttcaaacgggaaatagaggcctatccgagcagcaacgctttcttcatgcaaagcgtactggcacatacaatgccccaaaaggaaatcgttgttttcggaaggaaagatgacccggacagaaaacgtttcattgaggcgcttcaggagcatttcactcccgcctatacgattctcgccgcagaacatccggatgagcttgccggcatttctgactttgccgcgggttatcaaatgatcgacgggaagacaacggtctacatttgcgagaatttcgcctgccggaggccgacgacggatattgatgaagcgatgaacaccttacaaatcagcagcagagcctaggcggcctgctgcttttcttttttcacaaaacggaatgcgagccatgcgaagatgatattgatcaccagagtcgatatgcaatcatatatttcatagccgccggctgctgttgtaaatatcgacggaatgccgccgtacaccgaatgatcctctgtgagaaagataaataaaaacatattattggcagcgtgaccgccaagagacatctccagactgcccgttttaatcgtgataaaggtccagatcatgccaatggtgacatatccgattcccgcccagagagctccattttccatttccggatttccgaaatgaagtgcgccgaataatccgccgataatgactgtcagaaccaccgcgtttgccgtcaattttccggcgaactgaagcagaaaaccgcgaaagagaaattcctccgcagaggtttgaatcggcaccaacaagacggccgccgctaacagcagcagaaaacgtgaagcatggaattcctgaagcatgaaacgatccggatgaattgtaaaatcaatcagccccgcgacaaacatcagcacaacatatgtgccgaatccaaagaaaatcctcttccagttcagcgactgattcggtgtgatgatggataaaaaccgccgtttcataatgaaacgaactgctatccaaatgcccggaatcgctatgaaatagacgatatgctgtaaataaatatccgccagcgggtcacttaatgccccctcatcccaatttatcgtcagtgaaggattgaaagcggacgtgagaaacatataaaacacggtcagtatgcttccgaaaaagaacaaacccacaatgaccaacagagaaagaatatatctcgatacactattttttccctctgtgggccgtacaaacgtattcatatttatgcatcaacttcctttccttcaacattttacaatataaacagaaacagatataggaaatgttatatgttttaagaagaaagcgctatgccgtttcctttggctctggttatttacactctgtttttgccaaaaaaagacctttataatgtagtcgtcagataaattcacagtattttctgattacaattgcaaagtcagggggttttttatgaaacatcagacattctcaaatgtagcgaaccgattagaccgtctccccatttcacgtgtgcactatcaagtattaaccgctctcggaatcatctatttttttgatctcgctgatctgtttacgctcagcaacgtggctccggcgctgattgagcattggggcgtgaagctgtccaccattgccgacatcaccgccgcatcattcctgggcatgtttttaggcgcgtccatcggcggaaggctgtccgatcggatcggcaggaaaaaagcgctgaattgttttgtccttgtcttttcgatctcatcttttctgaatgcgctggcatgggacattccgtccttaatgattttccgcttcttgaccggtctcggcgtcgcggccgccatgattgtgacgaacagctatttggcggaattttttccatcctccgtacggggaaaatacatctccctttgcgccatgatcggactgatcggcgttcccgtcacaaacgttgtttccgcttttgtcattcctttaggctcatgggggtggcggctcgtattcatatggggggcggccggtctcatttatttcttttttatccgccggcttgaggaatcgccgcgctggcacgaaaatcggggcgcatatgatcaggcaaacgccattatgaaccgtcttgaagcacgtatagagaaagaaaaaggcccgcttcccgtgccaaaagaggcggcagaagtacatacagtgaagcacgcaggctacttagggctgtttcagggcaggaatttaaagatcaccatcatcctgtcagcggtatggattcttgaaacctttggcttttacggctttgcttcatgggtgcccagcctgctgaaaagcaacggcatcaccatggaaaaaacactgtggtacaatgtgcttcactctgtcggcgccccgcttggcgcattgctcggttccatgatatccgagacgttccaaaggaaatggattctggccgcaagcgcttttctgactgccattgccggactgttatacggcatgacgtttattcccgtcatgattattgtgtttggctttgtcgttaacgtcacggaacggatcttcacctcaaatctatacgcctacacatcggagccgtatcctacggaatatcgctcggccgggagcgggctggcgtacgggctcggccgtttttccaatatattcggctccctgctcgtcggatttattgccgttaagctcggctacatcagcgtctttttgttcatcggcggctgctggcttctgtgttccgttttgttaatcctcttcggcccgaaaacaaatgcacagcaaatttaatcaaaaaaacagtgcggaatcactccgcactgttacactgtgatttctatcaaattgccttccccatcctctatcacgctctcataatatccgtcacccgtcacgcgcgggccgcttacaacctgaaatccatcatttttaaacgtttccgtcaattcattcacccgctccttgctgcctgtagaaaatgcgagatgcgcccatccggtcatattctgtgccggagcttcatcaatgccgccttttttcataagttccagcctgcatccggagtcaaatgtcagaaaatacgatttgaaatcttttttctcattatgataaaggtcattggccttggcgccgaagtatttctcataaaattttttcatccgttccaagtctttcacccatatcgctgcatgttcaattcgcatatgtccgcctccctttttttctcaatctatttataaagcatgaaacccatttcagctcaagactttttccgctgaaattgatgcataatttgttttttagctgtttcttcgtgaaaaaacaataaaaatgcttcctttccgacccgttccaaatgaagttccagggatggaatattcaatgcccggctgacgctcagatttcccttgccgatgatctccgcatcccatttctgttctttcgcaaactggtacaagccggcagccacgtcatcactgtgcgcatagatggctgtcggcgccttgtcgaaaccccagaagtgctcacccgcacgctttccgtcgtccatatcatggcatccgaccagaatgcgggtttcatcaagggagccgaaaaccgccttatatgcggttaccttgtcggccgtactcgggcttttttccgcttcccgcacacatgtaaaagcaacgtcttgatgtccgcggtttttcaaatacaaaaagctttctctgtatgctgcctgcctgtcattataagcgcagggaatctcttgatgctgtgtatattcacaagcgacaatgggaccgtattccaggtaaggcacggcggtttcccattcattcgcgcgggacgtgacaatcagtccgtcaatctttttcattttcagcagttcgaaataggtcatctctatagcggggtcataattggtggggagaagggttgtcacgtaatcatgggcaaacgcttccttcgtgataccgtttacaattttgtcaaagcagggatggtcactgtacggcaaaatcacgccgattgtattggtctttccgcgaatcagatcaatggcggttcgattaggggtataatccagctccttcatcacttgattcacaagacgccttttctcctcagatacgtacggatgtcggtttaatacgcgtgatacggtggccaccgacacattcgccagtttcgcaatctcttttatatttgccatgtgctcctccattttcggtgataaaaaagcagcaagagtggatttctcttactgctatctcatcataaatccactgtcatttcaacagggcaatggtcagaacccatgatatcggcacaaatggccgcttggctgatccgctgcttcagtctgtctgaaacaatgacgtaatcaagccgccaaccgatgtttttctcacgtgcgttcgtcctgtaagaccaccaggagtaggcgccttcccgatcaggatataaatagcggaatgagtcggtaaatcccgcgttcagcagggcgctgaacgcttcccgctcctgctccgagaaaccggcgttcttccggttggctttcggattttttaagtctatctccctgtgtgcgacattcagatcgccgcataagatcacgggcttcttccggtcaagcttctgcagataatccttaaaatcggcttcccattgaagacggtaatcaattcgctctaatccgcgtttggcattcggcgtataacagttgacgacaaacacatgctcaaattcaagcgtgatcacccgtccttcttgatcatggtcgtcaatccccagtccatagaacacgtgcagcggcttttctttcgaaaaaacagccgtgcctgagtagccttttttcaccgcatagttccaataggcgtgatatccttcaagctgtaatgatacttgtccgtcctgtacttttgtttcttgcagacatagaatatcggcttccgtttcctgaacgtaagtattgatatctatctttttcatcacggcacgcaagccgtttacattccaagaaatcagattcatgtgatccctcctgtccggctcagccggtatttcagtgtttcaatgtttccgccctctaatgccagcagctgctttttcatttctaaaccgcctctgaacccggtcagtttcccgttttttccgatgacgcgatggcacggaaccgtaatcaataccggatttttcccgattgcggcgcccacggctcttacggctgccggtttctgaatcatttctgctatatccgaataggagtatgtctcgccgtacggtatgtccataagcgctttccatacagcaagctgaaattctgtcccgtaaagatccaccggcactgaaaaagctgatctgccattgtcaatgtactcggacagctctgccgtgtaaggcgccagcttttcatcatcacctgccaatcggtattgcggcagtgatctttttgcccactgctcaagctcttcaaagcttccatgatttgaccctataaagcaaagccccttagatgtagcggctgtatacaggctccaatcattccgtgtgaagagtgtccaatagatcataggctctttactcatattgaacctccctgtcccattttggccgtttttctgtattctgtgggcgaactcccggttccctttttaaaaagggtcgcgaaatgcgctgtgtttggaattccgacagtcagagcgatctccatgactgtcatatcagtatgctttaaaaggtgttccgccttcgacaatcttattttctgtatatacgcaatcggggatattcccctgatttttttaaatgtccgctgtaaatgataggggctgccgtgacacatttcggccaatacgctcagagtcagggattcgtgataatggcggtcaatgtactcagtgatttgagcaatccattcttcatcaggaagacgaagaccgttcggccggcaccttttacagggacgaaaatgtctctcgagcgctgcatcagccgtatcaaacaccagcacgttttctttattcggaactctcgatttacaagaaggccgacagaaaatccccgtcgtttttaccgcataataaaatgccccgtcataagaagcatcattgtgtatgattgcgctccacttttcatcagtcaggatatttctgtctgtttccatctcagccaccccctgttcttcagtataaacaaattcattgcttaagtacgcgtttttgaatagaggagcaagataacaaagataggtgtcaggagcacttccatgtttcatgtgaaacatttcggcaggatggagagggactgatataaaaaaagagcaggagcccgcaggctcttgctcttttctttcggtttactcgccagttacgtatggaagtaaagccatttgacgtgcgcgtttgatcgcgatagtcaatttacgttggtatttcgcgtttgttccagttacacggcgaggtaagattttaccacgctcagaaacaaactttctaagaagatctacatctttgtaatcgatgtgcgtaatgccgttagaagtgaagtaacaaaccttacggcgtttcgcacgaccgcctctgcgtcctcctgccattgtcatttcccacctttctcgttatgaatatagcgataatctattagaacggaagatcatcatccgagatgtcaatcggcttgccgtcgttggcaaatggatcatcattaaagctgttcccttgatttcgtctctggttgttctgatttccgccgaacggattatcattttggcctccgccaaagtattggcctccgccgctgtttccttcgttgtatccgcctgatccagaaccgccgctgtttttaggctcaagaaattgaacactttcagcttggacttctgtcacgaagacacgctgtccctgctggttttcataatttcttgtctggagtcggccgtctacgccggcaaggcttccttttttaagaaagtttgcaacgttttcggcttgtcttctccaagtgacacaattaatgaaatcggcttcacgctctccggactggttagtgaatgtacgattcacagcaagagtaaacgtggcgacagccgcaccgcttggcgtataacgaagctctgggtcttttgtcagtcttccgactaatacaactcggttaagcatatgaaagaccaccttttaacattatatatttcaaattgcttattcttcttctttaacaacgatgtggcgaatgatatcgtcactgatcttagctaaacggtcgaattcagcaaccgctgcagcttcagactgaacgtttaagatttggtagaaaccgtcacggaaatcgttgatttcgtaagcaagacgacgtttaccccaatcttttgttccagtgatctccgctccgttagaagtcaatacgttgttgaaacgctcgataactgccttctttgactcttcgtcaatgttcggacggataatgtacataacttcgtactttttcatctgtttgcacctccttttggtctaagcggccctataatgggcaaggagcaataattctattactcacaagtttatattataccaaagctcttgtccctttacaactgtgtcctatacattaaatcggaaatgaatgacatctccgtcttggactacatattctttaccttccagacgcacttttccggcttctttcgctccggacattccaccgcctgccaaaaggtcttcataagcaaccgtttcagcgcggataaagccgcgttcaaagtcagtgtggatgatacccgcacactcaggagctttcatgccttttctgaatgtccatgcgcgcacttcctgttcgcccgccgtaaagtatgtcgcaaggccgagaagagagtatgatgctttaatcagctgatcaagacctgattcttcgatgccgagctcctcaaggaacatttgcttttcttcgccttccaattcagcaatttcagactcaattttcgcacagacgacgataacttcggcgttttcacccgcggcgtactcccggattttcgcaacatattcattatctgaaggatcagccacttcatcctcgcttacatttgctacataaagcacgggttttgacgtaagcaaatgaagctgcttcacaagcttttgctgttcttccgtaaattcaacggaacgggcaggcttttcttgttcgaaagcttcttttaatttagacagaatgtcaaattcaaaaaccgcttctttgtctttttgcttagcaagcttgcttacacgcgtgatgcgtttttcgactgtctccatgtcggcaagaatcaattcaagattgatcgtttcaatatcgtcaatcggatcgactttccctgacacgtgcgtaatattgtcatcagcgaatgcgcgtacaacgtggcagattgcatcaacctgacggatatgagaaagaaacttattaccgagtccttcaccttttgatgcgccttttacgatccccgcgatatcagtgaattcaaacgcagtcggcaccgtttttttcgggttcaccaattcagtcagcttttgcagacgttcatccggcacttccacgattcccacgttcggatcaattgtacagaacgggtagttggctgattcggcaccagcctgggtaattgcattaaataacgtcgattttccgacattcggcaaaccgacaattccagcagttaaagccattctttcatctcctctatatcaaaccatcatcgtataaacgtattgtaaacctagagcaattataaggaggttcataggaaaagacaagctgagaaaaaagcatttcccgccctctctctccttagattatccttttttaaccgctaccagacagtcaaaaagcgtacttcccattccattatcggaatttgaatcctttgtgagcatgttgacggagcctccgaatgccgcccacatgccttcatctatattcaccgtcttcggatgagcctgcttcatgattttcaccctgccgcgcagacggccgcggtcattgtatacctctgccgtatctccgtcttgaagtgaaagctcctcggcgatatccggcgacaggtccacctgaatctgctgaagcttttcaataaacggcacgtgctgtgaatgattggagcgctgcgggtgaatggacagcagcgtatacggatatttcccggccagtccggcgtcatgataaacagactcctccggcacttccaattgagggaggccgctgtatcctttctcttctgccagtgacgagacgaattcaaattttccgctcggggttaaaaattgaaaatcactccacggaacctgtttgaccggaagcggcatatgtcctttttcctttaattgctcaagggtgattccttctttctccaaagaagagagccccatttttaagaaatcttccgtactgtaatcaaacagctccccgaatccgagacgctttgcgagttccgtccagatccagcggtctgattttgcctctccctgcggttccgcaagcttcttgccatattgaacatagtgatgatacatgctggaataataaatatcttcctcttcgaaaacaacggccgtcggcagcacatagtcacagagcttcgccgtatcggtcatgaccgaatcaatggccactgtgaccggtgttttttcaaatgcttccttcactttttttgtattcggcacctgtgtcagcggattgccgcacgtcacgatgatcatctcaatcggcggatcggctgcattcagcgcctcttcggcttgagtcatcatcgaaaacgttctcgaacttttcttcagatcaggacgggtgagctcggcctttgcaaagctttcaccgacttgcacatttccgaagtttgcgccgccgcctttgataccgacatttccgctcgccgcagctaaagcgtcaatccaccgtatcgtcccgcccccgtttttatatctctgcatcccaagacccataaaagtggaggtgggaccgtcagcatataaatcagcaagatattcaatcacttctaaagacgtttctgttttctcaatgatctcctcaatagaaatcgtctgcagaagcttttctatttcttcaaaaccgaccgaatgcctttggatgaaatcggaatcggttctgccggtttggcataatatttttaaaacacccgccgcaagccagccatccatgccgggtttaacggatatataccgatcggcaagcttggcagtcgggttaaaaataggatcaatgaccgtcagtgtcactccttttttcttcacctgctgcagatgatgatagaggtgcatattcgtccgggacacgtttctgccccatacgatcacatgcttgctgtgataaatatcaagcggtccatgcccgtaagaacgcccgaaatcccagcgctgcgcttcaataccggaaccccagcaaatgctgcccgcaatctccgttacaccgccgtatccattgaaaaaacgctggtcgagcgccttcaaaagaccgttattggcgtaatcatgactgtgcagcactgcggcagtgcccaacgtctccttaatcaccgccattttttcagcaatttcatctaacgcctgctcccaggaaacgcggacaaattcgccgtctatcttttttaaaggaaaacgaagccgttccggcgcattcgttttcgcctccagcattctgccacggccgcaaattttcccttctgtaatgggatgattcgggtctccgtctactttcgtcacctttccatcctcaactgtcaccaaaaagccgcagctgtcccagcaattcagcgggcacgctgactgatgcactttgctcatcgggcctcttcctctcctctatatgaaaaagcatgagcgccagcccttatgatgtaggctcctcatgcttgacgagtacttttttcagctttctctcaaaatctcttctcggaatcatgacactgtgggaacaacccgtgcatttaatccgaatatccattcccatccgaatgattttccacctgttttcaccgcaaggatgcggtttcttcatttcaacaatatcattcaggccaaagtctttatccgccaagacccttcacctctctccatagactgctttatttattgtacaaaaaaaaacaggataagagcaacggccgcactcaaaatgagcattatacttttttccatctccctaaaatagggtaaagaagaagacatatcagcaaataaagacttaaaagcccgtaaatgggatataaaatcgcgatcaaatctgaaaaaccgattgtcgtaaaaggcaccatcacagctaacagaagagatacgagcgtccatctcggcaatttcacaaatgcaagcatgcggctggacagcccgaacagaccggtcacggttgtcgtatagatggctaaaaaaagcacggcggccatacaaagaaataacggataaggagcgccttcaaggacggcgaaaagaggaatctcatattgtgtaagactgcctgaaagctgtacaagcgtttcattgtaaacaaatgaaatcataccgaaaatcagcccgcttgcaacgcttgcgattttcgcttctcccagtcccttcatatcttttccgattgaagaaagaacagcgacaacagaaaggatgtttaaggacgtgaaagtaatgcttgccggccaattatactggcgggtcaaatctatcgtccacgtgtaatgatgggttgtctgaaaaaagaccaatgcatataacagccccgctacaagaatcggtatcaaaatactattcagagataatattccttttatatcccaaaagaataaaccgacggtcacaatgcaaagaagaaaaataccgatccaaaacggcagcttgtacatttgcagcgtcacaccgccgccggcaatcataaccatcgtcattgaaaacaaataaaacataataagcacatcatagactttagcaagagccggccccatcagatgctcaagcacaggtaaaaagtgcgttgattgaacccgatagctgatcttcaacacaatataagccgaaatcgtaaacatgactgtaaacaatacaatagccagtccgctttcgacaccgaaaaactgccatatttcctgcccgcttgcatatccagccccaatctgactgcttaatatgagcagcatccacttcatcccggctctccacaccctcatcacctcataaaatttctgatcatctccgcatattgctactatattgagtgacagcggcaatcattcatacaaaagggacaaatatggtatgataacgaagattgactattcagaaaaattcacttatgcaaggagctcaaaacatgtacatcaggcgtttaaccgcaaatgatacccagccttattccgatatcaggctcaaagctttaaaagatcacccggacgcatttgccgtcagctacgatgaggagaaagaatggccgtccgaaaaatttaaagccaggcttgaagccgacaatgccatcgtgcttggcgcctttgaaaaagacagactgataggaatcctcaagatctccaagcatccgctgtttaaactaagacacattgcggttatcggttctatgtatatttcccccaaacaccgagggtcaggcgcaggaaaagctttaatgacggaagccatcagccgagcaaaaaagatgaaggacacagaacagctccatctctctgttacctcaacaaatgaacccgcaataaaactctacgctcagttaggatttatcctcttctctacagaaaaaagagcgctgaaattggatcatcagcaatatgtcgacgtagatcaaatggtcttatttctgtcatgaacttagagaacaattgctctgggttcttttttctatcccgctcttttcaaacaaccggcatgctgatcatgacataagcataaaaaaaggcagcgctggatatactgtaaacaaccatacaacaccaaaaacaacaatgtattactcgtatgacatgacaaggaagtgaaccttatgaatcgaaaaggcgggcttttttctcaagaacgggcaaaacaatatgtatctcatacggattcttctgctgcgaatcaaatacaagcgatccttacttcatctttacgtaaagcagccggcagaccgttagtcaccgtgtgtatcggcacagatcggtcgaccggagattcattaggtccgctcgtaggaacaaagttagaaaaaatgaatttaggcagattgcacgtttacggcacgctgtcagatcctgttcacgccgtcaatatgaaagacaagctaaaagatattcaacatctacataaaaatccgtttattatagcggttgatgcttgtttaggccgcgtcaaaagcgtagggtcatttcaaatcggcgatgggccgctgaagcccggagcaggtgttcaaaaagatcttcctgaaatcggtgacgtccatatcaatggaatcgtcaatgtcagcgggtttatggagtattttgtcctgcagaatacgaggcttcatcttgttatgagcatggcaaatgttttagcagaggggttacagctgacagataaatcagaaggccggcaggaacggctcagtccgtttcataagctgacaagacgtatataaaaaaccatctttttttaaaaagatggtttttacgcttctctttcagacaatagttctaggatacgttcaagatcttcatttgagaaaaactcaatctcaatcttcccttttttcttttgtctcttaatatttactgttgttccgaagtaattttgcaaatacgattcccgctcttttaacacaacatcttggacaggttcttttttctttgtttcacgtggaacattgttgtttaactgctgaatcagctgctcaagctgacggacgttcagctgttcttcaaccactttcttcacaagcggttcaagcttgtttttatttttcaaaccaagcaaggttctgccgtgtcccatggataacgtaccttctgcaatgaggttctggatgctttccggcagtgtcagcagtcttaaatggttggcaatatgaggcctgctttttccgagccgtttagcgagctgttcctgggttaaatccaaatgcttcagcagtgagtcatatgccagagcttcttcaagcggtgataagtcttcacgctgaaggttttccaaaagagcgatttcccgcatcagcgattcagataaatcccgcacgatagccggcactgtctctttaccggcaagttttgcggcgcggtaacggcgttcgccggctacaatatcatagcccttcaatgattttctcacgataatgggctgaagaatgccatgctgaatgatggattccttcagttcagctaatgactcatcgtcaaattgttttcttggctgataaggattggggcgtaaatcactgattttaatctcttccactgtctcttcagacaaatcaacctgattaaacaacgcgttaatcccttttccgagcccgcctttagccattcgctgccacttcctttgctaaatctaaatatacttccgcacctctcgaacgcggatcgtataatatgatcggcttgccgtgactcggcgcctcacttaaacggacattgcgaggaataatggtttgatacactttatctctaaagtatttctttacctcttctatcacttgaatgccgagattcgttctggcatcaagcatcgtcagaagcactccttctatcattaagtcggtatttaaatgtttttgcacaagccgaactgtatttaataattgactcaatccttcaagagcgtagtattcgcactgaaccgggataacgactgaatctgaagcggtaagcgcattaatcgttaataacccgagagacggaggacaatcaataatcatgtaatcgtaattttgtttcacagattctaatgctcttttcagcctgacctcccgtgagatcgtcggaaccaattcgatttccgctcccgcaagctggatcgtggccggaatgacatctaagttctctactgaagtcggtttaataatatctgtaacatctgcatcatctactaaaatgtcgtacacacaatgatccacatcggctttttcaatccctaatccgctcgttgcattgccctgcggatcaatatcaacaagaagaacccttttacctatgtaagccaagcaagcccccagattaacagaagtcgtcgtcttcccgactccgcctttttggttcgtaattgctatgatttttcccacgatgtcacctaccttcacatgaacatatactgtcttgtttctatcttatcaaaaaaagagtaaagcgttttatttttttcataatttgtttatcagcaagtgaaaaaaatgtaaacgaaaaagacactttctaatataagttctccgataaagtaccttttttgactgtaaaaagacaattcacgacacaaaaagataaaattttacatatataatgtatagtgcacaataaatctatcattatatcaaaatagttttttgattaaaataaaaactcccctgctgatcaggagagtttttatttaggtatccgaatggtaagctgaatgtactcttcgaattcttcttcctcagtattcagtctgacgccgctgtcttctaccatagacagggactgacgaatcgtattcatcgcaattcttgtatccctgctgaacgctttgcgtctcggctttggtttctgcttattctgttcaagcattttcaccactctgtcttccgtctgcttgacgtttaagcttttctcaatgatttccgcaagcaatgtgacctgaaactccggctgtttgagcggaatcagtgctcttgcatgacgttccgtaatttttttctccataatcgcatcctggacgggttccgggagctttaacaatcggagcttgttcgcaatcgttgactggccttttcctaagcgctgcgccaaggcttcctgtgttaaatcatgaagttctaacagccttgcgtacgcatgagcttcctcaatggaggacaattcttccctttgcaggttttcaatcaaagcgacagatgctgtttccgtatcagaaaaatctttaataattgcgggaatcttctcccattcaagcgtctgtaccgctctccagcgcctttcacccgcaatgagctcatattgtccttcatcttctgtatgtctgacaacaatcggctgaatgatgccgtgtgtatggatagtcattgctaactctttgattttttcatctgagaaaatggtgcgtggctgaaaacggttgggaacgatagcatgtaccggtatttcgagtatctcttctttgtttgtatcatgctcagctatctccggttcctcttccttctcaccaaacccgaagaaacgagagaatgaatgcttcatgtacctacaccacctttaaaaactgccatttttataattctattttctcatggtttttcctgctgtatcttcatcaattttgcagaaaatatgatggaattgtcacatcaggctgtctaaattacccttcaattggcgatttatttggagtgcccggttttctcggatattttttcggagtgcttttcgtcttgcgaatgatcatgatgttccgttcactttcttcaacaggaagtgtaaaggaatgaacttgttcaagctctcctcccaatactttaatcgccttttgccccgctttcagctcttcatcagctgctgctgctttcagtgcggcaaatacgccgtttttcttggccagcggcagacaaagctcactcaggaccgacagacgcgccaccgcacgggccgtcacgagatcgaagctttcccgtacgtctttccgttgtccgaatgtctccgctctgtcatggacaaatgtcgtatgctctaattgtaaagcatcagagagagtttccaaaaacgtaatccgcttattcagtgaatcgacgatggtgacatgcagatgcgggaagcagattttgatgggcaggcttggaaaaccggcgccggcgccgacatcacaaagagtggtgaccttttcaaaatcaatataaaatgccgccgttatcgaatcataaaaatgcttgagataaacttcctttttctcagtgattgatgtcagattcattttttcgttccattccacgagcatccggtaatacaactcgaattgctccagctggcggtcagaaagggaaatccctttctccgctaaactggatgtaaattcctctatattcatgccgtcatcctttctattcagctaccttggcaatacggccctgctccaggtataccagcaagattgaaatgtctgccggattgacgccggaaatacgggacgcttgagcaactgataaaggacgcacttctttcagcttttgacgggcttcagtagcaattcctttaatggcgtcataatcaatccgatcagggatttttttgttttccattttcttcagcttttccacttgctgcaaggatttttcgatatatccttcatatttcacctgaatttccacttgttccgccacatcttgcggaaccggagaatctgcaggcgcaagttttgtcactgtttcatagttcatttccggacgtttcattaaatctgtgccgcgcactccgtctttcagctcgcttccgccgagtgaacggatatattcctgattctcaggagacggcttgataataacagaccagagacgttttttctccgcctcgatcgccgcttttttcttctcaaacgcttcatagcgctcatcagaaattaagccgatatcgtggccgatttccgtcagacgaagatccgcgttgtcgtgacggagcagcagtctgtattccgcccgtgaagtcagcagacggtacggttcattggttcctttcgttaccaaatcatcaatcaatacaccgatataagcatcggaacggctgaggatcacttcttcttttccaagcgctttgcggcctgcgttgatccctgccataattccttgcccggctgcttcctcataacctgatgtaccgttaatttgaccggccgtgtacaggttagggatttttttcgtctccagtgtaggccagagctgcgtcggtacaatcgcgtcatactcaatcgcgtatccggctctcatcatctgcaccttttccagtcccggaatggtcgccagcatccgctgctgcacgtcctcaggaagactcgtggataaaccttgaacgtatacttcctgcgtatttctgccttccggctcaaggaaaatctgatgacgcggtttatcattaaaccgaacgactttatcttcaatcgaagggcagtatctcggtcccgttcctttaatcataccggaatacattggtgaacgatgcaggttgctgtcgatgatctcatgagtctcaggactcgtgtaagtcagccagcaaggcagctgatcggtaatgtattcaaccgtttcatatgagaaagcgcgcggaaccgggtcccccggctggatttctgttttgctgtaatcaatggaatcgcttgagacacgaggaggcgtgcccgttttaaaacggacgagatcaaaaccgagctcctctaagtgctcagaaagtttaatagacggctgctggttattcggaccgcttgagtaagacagatcaccgagaatgatccgccctcttaaatacgttccggttgtcagcacgaccgtttttgccttatattcagcaccggtttgcgtaatgacaccgcggcactccccgtcttcaatgattaaacgctcggcaatcccttgaagaagtgtcaaattcggtgttttttccagcgtatgcttcatttcgtgctgatattggaatttatccgcctgcgcacgcagcgcccgtacggccggaccttttcctgtattcagcattctcatttgaatatgagttttatctatatttctagccatttctccgccgagcgcgtcaatttcgcggacgacaatccctttcgcggggccgccgacagacggattacatggcataaacgcaaccatatcaagattgatcgtcaaaacaagcgttttggctccctggcgcgcggatgcgagggcagcctcaacaccggcatgcccggcgccgatgacaatcacgtcgtattggcctgcttcataccccatggttttttcctcccttttatttacctaaacaaaattgtgaaaagagctgatcaattaagctttcgtggacggcatcacctatgatttcgcccagcagctcccagcaccttgtcaaatcaatttggaccatatcaatcggaacatcctgttcaattccgttcagcgcatcatcaatcgcttgctttgcctgatgcagaatcgagatatgacgggtgttgctgacataggtgagatctccgctttcgatcgctcctgtataaaatagcgactgaatcgcttcctctaaatcttgaatgccttcttctttcagcaatgaggtcgtgacgacaggccggcctttcgccagttccttgacgcgctcagcgtcaatcttagcctcaaggtccgtcttattcataatgacaatgacgtccattccctcaaccgcttcaaacaatttcacatcttcttcagaaagctcttcgctgtggttaagcacaagcaaaatgagatccgcttccttcagaacctgccgtgaccgttccacaccgattctttcgacgatgtcttctgtctcacggattccggcggtatcgacaagccgaagcggcacgcctcggacattgacatattcctcaatcacatcacgcgtcgttcccggaatatcggttacgatcgccttcgtttcatggacaaggctgttaagcagagaggattttccgacgttcggacggccgatgatcacggtagacagtccctcacgcaaaattttcccctgctcagacgtacggagcagcgcctcgatttctttcttcacgccgcttgccttctccactaaaagctgatgcgtcatttcttcgacgtcatcatattccggataatctatattaacctcaacatgggcaagtgtttctaacaactcatcacgcagacggcggacaagcgcggaaagccgtccttccatctggttcatggcgacattcatggcacggtccgttttggccctgatcagatccatcaccgcttccgcctgtgataggtcaatccgtccgtttaaaaatgcgcgcttcgtaaactcaccgggttctgccagtctcgcaccttctcttaaagcaagctggagcacctgattaaccgtcacaatacccccatgacagttgatttcaatgacatcttcccttgtgaatgttctgggcgctcttaaaacagacaccatgacttcctcaataatccgtcccgtcgtgctgtccgcgatatgcccgtaatgaatggtatgcgattctgccgaactgagcgttttgcctttcggacccttgtacattttgtcggcgatctttacggcttcagggccgctcagccgaacgatcgcaatcgcgccttcacccatcggagttgaaatcgctgcaattgtatccatgctgttcacctctctttatctctgtttccatctatataaaaaattttatttacgccaaaattaaaagataacatagtttggtttgaagtggaagatacgttatccacaaaggcagaaattcatcccttattactttaacttatccacatgtgaataacaattaattttatttcctaaaaccttttttatcaacagcatagaccgaaaaagaaaaaacttaaacgcaaaaagtgcgattctgcttaggaatagagccatttttaccaataaaaaaaccgaagttccgattttacccggacttcggttttctgctatctttatgggaaataacgaggtggcggtaccggccttcaccggtagaaaacgttttgatatttggatgctttgacagcgcgtcatggatgatttttctttcacctgacggcatcggttctaaatgcacatcttttttcgttttcgacacttgcttggccagcctgtttgccagctgctccagaatttctcttcttttccgccgataattctcagcgtcgacaacggcttggcgatactggccggagccgcggttcaaaacaagctgcgtcaatgtttccagggcattgagtgtttgtcctcttttgccaataagcagcgccgctttttcacctttaatgtgaaaacagactgttttcttgttttcttccgtaacaatctcagaaggtccggcaatggaatggatgatttcttccaaatacgctttcgcttcatgaacaggattttttttctcttccagttctacgatcgcattcttttttccgaaaatacccaaaaaccctttgtatccttcttgcaccaccgttatttctacttgatctttcgtcagttgaagttcctgaaggcctgattgaactgcttcttcgacattccgtcccgcagcagtcaccttcttcactttttctttcctcccgctttctgcgtttccggatcgtgtttaatgtcaggtcctttaataaggaatgtctgagcaatcataaacaggtttccgactacccaatacagagaaagcgcgctcgggaagttgatcgcaaatacgatgatcatgatcggcataatccataccatcatcgccatttgaggattctgagtcggatttccggccatcatcagcttctgctggacaaaagtggccacaccggcaacgataggaagaatatagtaaggatccttctctcctaggtcaaaccataaaaagctgtgctgtgaaatggcttgcgtacgcataatggcgtggtagaatccgatcaaaatcggcatttgaatcaggatcgggaaacatccggccagcgggtttaccccgtgctttgaaaacagggccatcgtttcctgctgaagcttctgctgcgttttttgatctttagagctgtatttttctctgagcttctgcatttcaggctgcagcgcctgcatcgcttttgagcttcgaagctgcttgatcatcagcggcagaatcagcagacgaattaaaatcgtaacgatgataatcgataaaccatagttatcgcccgtcagtttcgctacgtacgtaatgacttctgacaatggatacacaacatatttgtcccagaaatgcggactattcgccgtaatcggctctttcacactcgagcacccggccagcagcacgagcataccgaccatactcagtagtaaccatattctccttttcaagaacgtttcctcctataccaatctttatgaaccttgtatgtattttagcatctttcagtttcaaatggcgttcatttttcgccaaataaaaggaagcgcttttaaaaacgtgaagaaaacaaaatatgagctattttgacgaagatttcttatataatgaggtttttctgaataagtgctgcagactctttttcgtttcttcaaaactgaggtcgccggcgggttttcttgcgataataataaaatctttcggcttgagcagctctttttcctcctgaacagcctgtctgattaaccgcttcacccgattgcgcacgacggcattgccgatttttttactgacagaaagccctacccggagctcttcctgtttcggctgatcaagcgtatacagcacgaactggcggtttgccatagacgttccgcgtttaaacactttttgaaaatcttcatttttctttaaccgatttcgcttcttcactttaattcactccgatattcactcgcagaaacttttatttctatctaaaaaaaacgggccgccggaatactgaagaaatttctccagtaccgggcgacgcatgacatctcactctcttaatgtgaaaaaagaccactgacattattcagtggcctaagctgataatacttttctgcctttgcggcgacggcgtgctaatactagacgaccgttttttgaactcatacggcttctgaagccatgaactttactgcgtttacggttattcggttggaatgttcttttcatttatgacacctccctcgaggaatagctgttaaagacagtcttacttattatatttgtgctgcctattcattgtcaacttcagcagtgcttttatttcttacaaccataataggataacataccttaaccagtttagaaaccttatttttcatattcctttttttaacgcaaaaaaaaagccgcgctcccccggaaaaacgacatgtggataatttttttgcctttttttaatatccacagtcgttatcgacaacattttcacattgctaactcctgtggacaaagatttttcaacaagttgtcaggtttgtggataagattacgagaaccattgcaagtcctcgcttaatttgatattatatttgtgttttaactcttaattacttatccagcccattctctttatccacaaactgtggataagttgtggattgttttcacacagcttgtgtagattgttgtccacaacttgtggaatttgtcgaaaagctgtttttctactatactatatgttttcaacatttcgtgtgtacgaatggtcagagccatatgctctttttttgtgttctataacagggaaagggcgctgatttttaaagaaaaggagggctgtgccggataatggagaatatattagatctttggaatcaagctctagctcaaattgagaaaaagctaagcaaaccgagtttcgaaacttggatgaagtcgacgaaagcccattcgctgcaaggggataccttaaccatcaccgctcccaatgaatttgccagagactggctggagtccaggtacttacatctcattgcagataccatatacgaattaaccggggaagaattgagcgtcaaatttgtcattcctcaaaatcaggacgaagaaaactttttaccgaaaccgcaagtgaaaaaagcggcaaaagaggaaccgtctgattttccccaaagcatgctcaacccgaaatatacattcgacacattcgtcatcggatcgggaaaccgattcgcccatgcagcatcactggctgtggcggaagcacccgctaaagcgtacaaccctttatttatatacgggggagtcggcttaggaaaaacccacttaatgcacgcaatcggccattatgtcattgatcataatccttcagccaaagtggtgtacctgtcttctgaaaaattcacaaatgaattcatcaactcaatccgcgataataaagccgttgatttccgcaaccgctatcggaacgttgatgtacttttgatagatgatattcaatttttagccggaaaagaacaaacacaggaagagtttttccatacattcaacacgcttcatgaagaaagcaaacaaatcgtgatttccagcgacagaccgccgaaagagatcccgacccttgaagaccgcctgcgttcgcggttcgaatggggattgattacggatatcacaccgccggatctggaaacgcggattgccatcctgagaaaaaaagcgaaggcggaaggccttgatattccgaacgaggtcatgctttacatcgcgaatcagattgacagcaacatccgcgaactggaaggggcattaatccgggttgtcgcctattcatctttaatcaataaagacattaacgcagacctggctgcagaagcattgaaagatattattccgtcttctaagccgaaggtcattacgataaaagagattcagcggattgtcggacagcagttcaacattaagcttgaagatttcaaagcgaaaaagcgcacgaaatccgtggcgttcccaagacaaattgcgatgtatctttcaagagaaatgacagattcttctttgcctaaaatcggggaagaatttggcgggagagaccatacaaccgtcattcacgcccatgaaaagatttcaaaactgctgattgatgacgagcagcttcagcagcaggtgaaagaaataaaagaactgcttaaataatagtgccctcggatgaatcggggaaagtgtgaataactttttcatagccatacacagtctgtccacatgtggataggctgtgtttcctgtctttttcacaacttatccacaaatccacaggccctactattactactgctatttttaaaatatattaattatattatccgttaggaggataaacatgaaatttacgattcaaaaagatcgtttagtcgaaagtgtacaagacgttctaaaagccgtttcatccagaaccacaattcccattctcaccggtattaagatcgtcgcctcagatgaaggagtatctttcacgggaagtgactctgatatttcaatcgagtcattcattccgaaagaagaagaagataaagaaatcgtgacgatcgatcagccgggaagtatcgtgctgcaagcgcgtttcttcagcgaaatcgttaaaaaacttccgatggcgactgttgaaatcgaagttcaaaatcaatatttaacgattatccgttccggaaaagccgaatttaatttaaacggccttgatgcagatgaatatccgcatctgccgcaaatcgaagagcatcacgccattcagattccgacggatcttttgaaaaacctgattcgccaaaccgtgttcgctgtgtccgcctcagaaacacgccctatcttgacaggtgtaaactggaaagtcgaaaacggtgaattattatgcactgccacggatagccaccgactcgctttaagaaaggcgaagcttgatattccggaagacagctcttataacgtggtcattcccgggaaaagcttaactgagctgagcaaaattcttgatgacaaccaagaactggttgatatcgtcattacagaaacccaagttctgttcaaaacgaaaaacgtattgttcttctcaagattgcttgatggaaactatccggacacgaccagcttaattccgcaggaaagcaaaacggaaatcgtcgtgaacacgaaggaatttttacaggcgatagaccgtgcttctttattggcgagagaaggccgcaacaacgttgtaaagctttctgccaaaccggcggattcgctggagatttcatcaaattctccggaaatcgggaaagtggtcgaagctgtgctggctgaccagattgacggcgaggaattaaatatttcattcagtccaaaatatatgatggacgcactgaaagtacttgaaggagcggacatccgtatcagctttacgggagcgatgagaccgtttcttatccgtacgccgaatgatgaaaccatcgttcagctcatccttccggtcagaacgtattaatcaaacagaatgtgctgccggcttagttcggcagcttttctattcatcagccgctccctcaagttttccctttccttatttcaggattttttagtacaattagatattagtgatatttgaaagaggtcgataatatggcaaatccgatttcgattgatacagaaatgattacgcttggccagtttttaaaattagccgatgtgattcagtccggcggcatggcgaagtggtttctgagcgagcatgaggtgactgtcaacaatgaacctgacaatcgccgcggcagaaagctttacgttggagacgtggtcgcgattgaaggatttggttcatttcaagtcgtcaattaaagcgggtgacagcggttgtatatccaaaatttagaattaacatcctaccgtaattatgagcgcgctgagcttcaattcgaaaacaaggtgaatgtgatcatcggggaaaatgcccaaggcaaaaccaatctgatggaagccatctatgtcctttcgatggcaaaatcacaccgcacctcaaatgacaaagaacttatacggtgggacgaagactatgctaaactagaaggaagagtgatgaagcgaaacggggacatcccgatgcagcttgtcatctccaaaaaaggtaaaaagggcaaggtcaatcatatagagcagcaaaaactcagtcagtatgtcggagcgctgaacaccattatgtttgcccctgaggatttaaatctcgtcaaaggaagccctcaggtaaggaggagatttctcgatatggagatcgggcaggtttctgccgtttatctgtatgatttatctctgtatcaaaaaatcctttcacagcggaatcattttctgaaacagctgcaaagccggaaacagactgaccggaccatgcttgacgttctcactgatcagctgattgaagcagctgcaaaagttgtcgccaaacgtctgcagtttacggcgcagcttgaaaaatgggcgcagccgatccattccggcatttcccggggacttgaagaactgacgcttaagtatcacacggcgcttgatgtatcagatcccaaagatttgtcgaaaataggtaacagctaccaggagtctttttcgaaattaaaagaaaaagaaatagaacgaggcgtcacattattcggaccgcatcgggatgatgtccttttttatgtgaacggacgcgatgtgcagacgtacggttcgcagggacagcagcgtacgacggctttgtctttgaagctggccgaaatagatttgattcatgaagaaatcggagaataccccattttacttttggatgatgtactaagcgagctggatgattaccgacagtcccatttgcttcatacgatccaaggccgtgtgcagacatttgtcaccacgacaagcgtggatggcattgaccacgataccttacatcaagcaggaatgttccgtgtggaaaacggtacgttagtgaagtgaagaaatgaggtgagcgattgtatattcatttaggtgacgactttgtcgtttcaacacgcgatatcgtcggcatttttgactgcaaggtcaatgtatcgccgatcgttgaagaatttctggacagacagaaagaaaaagtagtgccgtccgtaaacggcacgccaaagtctatcgtagtcacgactgagaatatatattactctcccttatcttccggcacactgaagaaacgtgcgcaatttatgttagaaatagattcttagcggatctttacaatgaatatatcgtttaagaaaagtgtaggtgaatgtgcatggctatggaacagcagcaaaatagttatgatgagaatcagatacaggtattagaaggtttggaagctgttcgaaagagaccggggatgtacatcggatcaactaacagcaaaggccttcaccacttggtgtgggaaatcgtcgacaacagtattgacgaagccctggccggttattgtacagatattaacatcgagattgaaaaagataacagcattaccgttaaggacaacgggcgcggcattccggtcggtatccaggagaagatgggccgccctgcggttgaagtcatcatgaccgttctccacgccggcggtaaatttgacggaagcggatataaagtatccggcggtcttcacggtgtaggggcgtctgtcgtaaacgccttgtcgaccactcttgacgttacggttcatcgtgacggaaaaatccactatcaggcgtacgagcgcggtgtacctgtggccgatcttgaagtgatcggtgatactgataagaccggaacgattacgcacttcgttccggatccggaaattttcaaagaaacaaccgtatacgactatgatctgctttcaaaccgtgtccgggaattggccttcctgacaaaaggcgtaaacatcacgattgaagacaaacgtgaaggacaagaacggaaaaacgagtaccactacgaaggcggaatcaaaagctatgttgagtacttaaaccgttccaaagaagtcgttcatgaagagccgatttatatcgaaggcgagaaagacggcataacggttgaagttgcattgcaatacaacgacagctatacaagcaatatttattctttcacgaataatatcaacacatacgaaggcggcacgcacgaggccggatttaaaaccggtctgacccgtgtcataaacgactatgcaagaagaaaagggattttcaaagaaaatgatccgaatttaagcggggatgatgtgagagaagggctgactgccattatttcaattaagcaccctgatccgcaattcgaaggtcagacgaaaacgaagctcggcaactccgaagcgagaacgatcactgatacgctgttttcttctgcgctggaaacattccttcttgaaaatccggactcagcccgcaaaatcgttgaaaaaggtttaatggccgcaagagcgcggatggcagcgaaaaaagcgcgggaattgacccgccgcaaaagtgcgcttgagatttccaatctgccgggcaaactggcggactgttcttctaaagatccgagcatttccgagctgtatatcgtagagggtgactctgcgggcggatcagcgaaacagggacgggaccgtcatttccaagccattctgccgctgcgcggtaagattctgaacgttgagaaagccagacttgataagattctctcaaacaatgaggtcagatcaatgatcacggccctcggaacaggaatcggagaagattttaatcttgaaaaagcgcgttatcataaagtggtcatcatgacggatgccgatgttgacggcgcccacatcagaacgcttttattaacgttcttctacagatacatgcgggaaatcatcgaaaacggctatgtctacattgcccagccgccgctttataaagtgcagcagggaaaacgggtggaatacgcttataacgataagcagcttgatgagctgttaaaagagcttccgcaatcacctaagcccggcctccagcgttataaaggtcttggagaaatgaacgcgactcagctttgggaaacgacaatggaccctgcgaccagaacgcttctgcaagtcaatcttgaagatgcaatggacgctgacgagacttttgaaatgctgatgggtgacaaagtagaaccgcggagaaacttcatagaagcaaacgccagatacgtgaaaaatcttgatatttaaccaagaaagccttattttcgttaagaaataaggcttttttctcaaagcggcttctaaagcctctgaaaacccgcaaaacccgtatattctactaaattaatgtgtataaacacaagtttattgatataatggagaatagtgaaatcgtattgaagatcataatggacaatctactcccacattatttcatgtgatacttcagggaggtttttttaatgagtgaacaaaacacaccacaagtacgtgaagtcaatatcagtcaggaaatgcggacatccttcctggactatgcaatgagcgttatcgtatcccgggcgcttccggatgtgcgtgacggtctgaagccggttcacagacggattttgtacgcaatgaatgatttaggcatgaccagtgacaaaccatataaaaaatctgcccgtatcgtcggtgaagttatcggtaagtaccacccgcacggtgactcagcggtttacgaatcaatggtcagaatggcgcaggattttaactaccgctacatgcttgttgacggacacggcaacttcgggtcggttgacggcgactcagcggccgcgatgcgttacacagaagcgaggatgtcaaaaatcgcaatggaaattctgcgtgacattacgaaagacacgattgactatcaagataactatgacggttcagaaagagaacctgccgtcatgccttcgagatttccgaatctgctcgtaaacggagctgccggtattgcggtcggaatggcgacaaatattcctccgcatcagcttggggaagtcattgaaggcgtgcttgccgtaagtgagaatcctgagattacaaaccaggagctgatggaatacatcccgggcccggattttccgactgcaggtcagattttgggccggagcggcatccgcaaggcatatgaatccggacggggatcaatcacaatccgggctaaggctgaaatcgaagagacatcatcgggaaaagaaagaattattgtcacagaacttccttatcaggtgaacaaagcgagattaattgaaaaaatcgcagatcttgtccgggacaaaaaaatcgaaggaattaccgatctgcgtgacgaatccgaccgtaacggaatgagaatcgttattgagatccgccgtgacgccaatgctcacgtcattttgaataacctttacaaacaaacggccctgcagacgtctttcggaatcaacctgctggcgctcgttgacggacagccgaaggtactaagcctgaaacaatgtctggagcattatcttgatcaccaaaaggttgtgatccggcgcagaacggcttacgaactccgcaaagcggaagcgagagctcacattctggaaggtttaagaattgctctcgatcatttagatgccgttatttctcttatccgcaattcccagacggctgaaattgcgagaacaggtttgatcgaacaattctcactgactgaaaaacaagcgcaagccattctggatatgcgccttcagcgattaaccggtctggagcgcgaaaagattgaagaggaatatcaatcacttgttgcgcttatcgccgagctgaaagatattttagccaatgaagaaagagttcttgagatcatccgtgaagaactcaatgaaatcaaagagcgtttcaatgatgagagacgcactgaaatcgtgacgtcgggtcttgaaacaattgaagatgaagatcttatcgagagagaaaacatcgtcatcacattgacccataacggctatgttaaacgtctcccggcgtccacataccgcagccaaaaacgaggcggaaaaggcgtacagggaatgggaacgaatgaagatgactttgtggaacacttaatttccacatcaacgcacgatacgatcctgttcttctctaataaagggaaggtataccgttctaaagggtatgaaatccctgaatacggccgtacggcaaaaggcattccgattattaaccttctggaggttgaaaaaggcgaatggattaatgccattattccggtcagcacgtttgatgaggagcaatacctcttctttacgaccaaacaaggggtgtcgaaacgtacggcactgtcccagtttgcgaatatacggaataacgggctgatcgccctaggcctccgggaagacgatgaactgatggccgtccgcctgactgacggcaagaaacaaatcatcatcggaacgaagaacggtttgctgatccgtttccctgaagaagatgtaagacaaatgggacgcacagctgcgggtgttaaaggcatcacgctgacagacgatgatgtcgttgtaggcatggagattcttgaagaagactcccatgtcctcatagtgacagaaaacggctacggcaaacgcacaccggcttcagaatacagagttcaaagccggggcggaaaaggccttaaaacatgtaaaatcactgacagcaacggtccgttagtaaccgtgaaagcaacaaaaggcgaagaggacttaatgattattacggcaagcggcgtgttaatcagaatggatattaatgatatctccactacgggacgcgtaacacaaggcgtccgtctgatccgcatgtctgatcaagagcatgtagccactgtggcgcttgtggaaaagaatgaagaagagccggaagaaacggaagaagtataaacgtaaaagcgcagctgcaacaggctgcgcttttactatataaagaaatgaaaaaaaagctttgacacatagtgatgatgctgatataatcatttttgttgtctttttaatagaaaggcaagcctagcgaaaatattttttaaaaaagtattgacctagcaaactgaaaatgttatgattaagaggtcgcttcgagagaagcaacaaagttctttgaaaactaaacaagacaaaacgtacctgttaattcaaagttttaaataaatcgcacagcgatgtgcgtagtcagtcaaactactttatcggagagtttgatcctggctcaggacgaacgctggcggcgtgcctaatacatgcaagtcgagcggacagatgggagcttgctccctgatgttagcggcggacgggtgagtaacacgtgggtaacctgcctgtaagactgggataactccgggaaaccggggctaataccggatggttgtctgaatcgcatggttcagacataaaaggtggcttcggctaccacttacagatggacccgcggcgcattagctagttggtgaggtaacggctcaccaaggcgacgatgcgtagccgacctgagagggtgatcggccacactgggactgagacacggcccagactcctacgggaggcagcagtagggaatcttccgcaatggacgaaagtctgacggagcaacgccgcgtgagtgatgaaggttttcggatcgtaaagctctgttgttagggaagaacaagtgccgttcaaatagggcggcaccttgacggtacctaaccagaaagccacggctaactacgtgccagcagccgcggtaatacgtaggtggcaagcgttgtccggaattattgggcgtaaagggctcgcaggcggtttcttaagtctgatgtgaaagcccccggctcaaccggggagggtcattggaaactggggaacttgagtgcagaagaggagagtggaattccacgtgtagcggtgaaatgcgtagagatgtggaggaacaccagtggcgaaggcgactctctggtctgtaactgacgctgaggagcgaaagcgtggggagcgaacaggattagataccctggtagtccacgccgtaaacgatgagtgctaagtgttagggggtttccgccccttagtgctgcagctaacgcattaagcactccgcctggggagtacggtcgcaagactgaaactcaaaggaattgacgggggcccgcacaagcggtggagcatgtggtttaattcgaagcaacgcgaagaaccttaccaggtcttgacatcctctgacaatcctagagataggacgtccccttcgggggcagagtgacaggtggtgcatggttgtcgtcagctcgtgtcgtgagatgttgggttaagtcccgcaacgagcgcaacccttgatcttagttgccagcattcagttgggcactctaaggtgactgccggtgacaaaccggaggaaggtggggatgacgtcaaatcatcatgccccttatgacctgggctacacacgtgctacaatggacagaacaaagggcagcgaaaccgcgaggttaagccaatctcacaaatctgttctcagttcggatcgcagtctgcaactcgactgcgtgaagctggaatcgctagtaatcgcggatcagcatgccgcggtgaatacgttcccgggccttgtacacaccgcccgtcacaccacgagagtttgtaacacccgaagtcggtgaggtaacctttatggagccagccgccgaaggtgggacagatgattggggtgaagtcgtaacaaggtagccgtatcggaaggtgcggctggatcacctcctttctaaggtttttaacggaatataagaccttgggtcttataaacagaacgttccctgtcttgtttagttttgaaggatcattccttcaaaacataggaacacctgctaaatgcgccacttcctgtggcaacgcatgtgttagcatgtcctatgcgttgttctttgaaaactagataacagaagtaattcacattcaattagtaatgcaagatatcacgtagtgattctttttaacggttaagttagaaagggcgcacggtggatgccttggcactaggagccgatgaaggacgggacgaacaccgatatgcttcggggagctgtaagcaagctttgatccggagatttccgaatggggaaacccaccactcgtaatggagtggcatccatatctgaatatataggatatgagaaggcagacccggggaactgaaacatctaagtacccggaggaagagaaagcaaatgcgattccctgagtagcggcgagcgaaacgggaccagcccaaaccaagaggcttgcctcttggggttgtaggacactctgtacggagttacaaaggaacgaggtagaygaagaggyctggaaaggcccgccataggaggtaacagccctgtagtcaaaacttcgttctctcctgagtggatcctgagtacggcggaacacgtgaaattccgtcggaatccgggaggaccatctcccaaggctaaatactccctagtgaccgatagtgaaccagtaccgtgagggaaaggtgaaaagcaccccggaaggggagtgaaagagatcctgaaaccgtgtgcctacaagtagtcagagcccgttaacgggtgatggcgtgccttttgtagaatgaaccggcgagttacgatcccgtgcaaggttaagcagaagatgcggagccgcagcgaaagcgagtctgaat

(The sequence listing continues in the following parts.)
